United States Patent Application Publication US 2026/0191916 A1 - sequence listing, part 81

SEQ ID NO: 576 - DNA, 2135386 bp, Enterocloster bolteae
  source 1..2135386: mol_type = genomic DNA
agcacttcacaacagtagcgtgctgtacgcagcggcggcatctgcttcttgacaatcaaatcccacatggtcagctccggatactcaaccttgacatctggaaatgcctcccgtataaaccgcaccaactccggaggatctactgttgtcaaatgataatgtgcctgaaacttcacatgggccatctttgcaagcacataaagcacaacactgtcttttccgccgctgaaggcaaggtaataaccatcctcatgataccggaccgcagcatcttcaaacatctgaaacaactggattgcccgttttaccttatctgaaaaatcatcaaaaagtctgtattgttccattctctcccgtccttcgcaattattctgctattgacggaaaagccattctttccggtgtgtctttttacgccgctaaccgcttttctttcaaggcctcggtccgcagtaacctggcatttaacggcaaccaggagttttctccgggaaatgagggaatggaacctttttagatttcaaatgggattgttgcatacgctatgggcgttattttaagaatttgtgcatttaaaatacgccggtatggacatttacggtttaattcctctacccagtctgagaatatcatttcaatctctaggtccagatcatcatgctccaaacgcagcaggatatatttataagcctttcggtaatttccccgcacagttacataagaatactctacttcatataacggagctgtcagccgtcctgtcaggaactgtgttgggtggagctttttgatgaattcccggtactcttctgttgccggaagattccctccaaccccaatctctgcaaacgaggcgatatctgcaaatttatgtatatgcataaacctctcctatcctaatgaaagtcaccttaaatgcatataaccttatcctcagcggaacaatatctatatgcatgattggataaccgttcatctgccggaacttcctctgcattaatggactgtatcaaatccgccagttcctgagaaactacagcatcctcagcacccagggtcggaaacagaatcacctcatctacactataaggaatgattaagaaatcctttcccacatgtaattcacagtatctcatgagcccgggatagagtaagacttctgcaccacaaaagtgaatccggtttgttaaaacatacatcatgtccgttattttcataagcactggtggatacttatttaccatattgaccaatgccctctgatacaattcctctttgtccacagaccaatagttcaaatgcttatttgttatcattaaggttgctgctatttcttctgtttcttcacataataataaaaatataacggataaatccagatatggaatgtttgggatgttctccagcatagaagcgttgtcgtgggtatttaccagtttacacatgattttatctttgattttctcaaaactcatatcatttacaatctcctgcataccagccggtatatctggcgccgatgcatagcattccagtatctcatcaataatcgcttgaagccctgttccttttttgtagcactcaaaaaaatctttcaagtgaatagaggggcgaaactgctgcccctctttttcaatgcacaactgtgtctggactatgccattgttgataaccggtttcagaacatgcacatggaaaccggcccctaatcttttggctacttcagagctgacagcttcggcaaatttttctaatgtcatcatgatgtgaatctccttttcaatttagaatttcgtttcacagtggaatggtcacagtttaaaatatctgcgatagcctctatactgtaaccctcgcttctcagttgctgtataacttcttttctctcctttcttgttgacacccgcacaattttgggatgcttcttttttaaaattttttgggaaatcggattattcaggccatgttcatacagaaaccgggcctcccttgcattgactcccattaagattgcaatgataaggcaatgatatccctccgaatcgtaagaatctctcatccgctcccgccttctggcttcttcctcctttctgcaaacaaaaaaagagacaccaaaacaattcattttgatgtctcttcattcccgcagcacaatagctgctcttattctgttactttaaaatcctgcttccagtttttaatgccggaacaaaaactacttgtaatccttggattacataaatcagctttcccactcattttaccaccatatatagtttttgtcaacttcattgcgctatatattgtgttgttctcctgcctgttccagtaccagctgttcaaggctttcgctgatataaaatccgttctttttcattttttcgagaacggaagcaatctccggaataatcccctctctcttggctttcaaaaggactccgattgttccggtaacttttagaccgagatattttgctgtttttttagcagcattgtcatctatcacgactaaatcgtccgctgtcccctcctgggccagaatcatgacttccacttctccatcgtgtagcttcgccttatacatctttttatctgactggtttgcgattttttccacatgtatccaattcaatgcagtctttaatacctgacatgccgaatcgtctttctctgtcacctcacggtacacagcctccgggatacaaatctctgcatagagcgccttcagtatatccaataatccaatattacaaagtacaatgatgggggtggaatttacaatcactctacgcattctccagttcctccaaaaactctgctttattgtcaaactggaaaatactgaccttcccctttcccagatatttaataaattcttcttctgtcataccggctatctgggcacagtatcctatggacacattattctgcgtataatatcctactgctaccatacatctggcaaatgcagcggcctcctcctcactcatatgtgtatcatacataactgcatccggtatgcggattgagatctggcacatagaagccctcctttctgttccagacaatttatgcttttacaaatctaatataacatatctgcccctcttattcaagcaaacaacttttacagggtctttagaactaaatcatcctgcctttttcataggttcctcatcttccctatggatacaagtgagcagtctgtcggctgctccctgtatctcattctttaaaagaccatacaagctggtaaagtttccaatcctgttttcccgaaatgcatactctgtctcaaacgcacgtatataagcatctgtcttgcaaaataggataaacaggtctttatcattgatgtacagactggctttcttgtcacagatataactgttctttttacaataccggccaccattggaatttttcattgcaatgccgcgtccgttttgtatttctacaaaccatgggtaattacgtttattcccctgggaatcagtatcataccggacaatcttaagttttgtgacaatactgtaaccctccttatctggattaccaaaaatcttttcctggggataatcaaattcccacagatgattaaagagcgccgagtatatgtatttagcttcttctgggctgatattggcatagacactcactgtattatcccctgttcctttgctgtaatccagcatattaagacggattaaggacctttccccaacttctgacacgtctccggacgcatggatatgagccggaaataaatatgacgctggttttaaattatccatgagctctaacagtgccttatctgttttatacacagcaatctgaccggatactacgttagaccagtcccgttcttccctttctgccatatgtctcctcctctatctgatgaaccgggcgatgagacctgccagtttgactggcattgtattgaaatctgcaatattcagaaatccgtctttgtatatttcctcaatcatctcacggtcatcaccaattgctgcggaaaacaacttaactcctcttttttccaggctatatttggcttcttgcaaatctgcttttgcaatttcgcctttatatccttgggcataaggctgtccatctgaaatcattaataatatttttatatcctctggccggtttagcagtttttgccctacaaatctaagtgctactccatctctattacaatcataggtactaacactcatgattcttaaataatcctgattgtctacagaatcaaaatctgcaaaagagtaaatgtctaccacttccgtatatcccatatcatgggttgtatggccatacagcataaccggtattcccagattccggcaaaacgtatacatgacaagacccgctttttgtgcagactcaatcctgccaccggatgacatagaacctgaaaggtcaagcagaaccgcaaatgcgattgaaaatccatcttccggttttattgttttttcaaaaatcttatcatccagccggtacagatttccacggcttaaacgtttccccatgtaaagacctgattgcgtacctccctccaaccgctccagcacatcttcaagcgatgcttccagccgtcttgtgattcggtttatttctggagcaatcattttatattctttttccaatcgcaggggaactgttgtcatccggtgcatttcaatcactgaatctttgtggataccatccaatttaaaatttgctgcctcctcctccagattcctttttaaatccgattcctcatcctgcagaaacttctcctctgctattttctgcaaaagattagataatgtctcatctatctccgatccttcctctgtttcctcttctcctccttcctgcctctgcccatctcgcattttctcaagtgcattttctaattcttcgttcttaccgttctgattttgagattccggttctccttccagctccccgtcccagccttcaatttcctcttccacttcattctgttcttccgaagcaccgatagtctctgaaagtgccacccataacattttccgctttaaatactcctgaattttcttactcagttcttcctccgaaagccggtttatttcatttttcaggctctttgccgctgttttaatggcctgtctgatgtatttccacaactttagcatcaggcggttcgtagcataaaagcgaatatccgggttagcgcttaccactgcctcatcaatgattttacggcaggaatttaagcgggaacaatactgtttatcatattctttttctgcctctgtccttccggctctggcatagcggaaaatcatatccagcataatggtcagtccatcgctcttttctgccttacgcgcttcctgcgttggaatatgatgaatgataagcgcggcattacgttgaattccattttgaatactgcccggatacttctggcacataaaactttcaatatacacatcttccagtacgttatttatataagaagcggttttctgtatcaccgaggctgccaccacgttatgggcatttaagtatcctttcatctcctcccaggcttttctttcgtataccagctgcacctgtggaggctttggatacacacgccatctggagaatccgcttacataccggccccgccgtttgaaatccgaacatctaagatggccgcattcatgggctataaacccctcatggctctttattttagacacccggctcgtcatcagatttgtgattaagttcgccgtatttaagtagaggagccgtccatttgtaaatgcaatcctggcgtcatcggactcttcataatccatgaacagggtaatatcattcttctgtcccaacaatctgacagattttaacatggtgtcatgataggattgagacagaaaaaaatctttatccgtcagccttcccattctattttttatttgattacgtttttgctgcacttttttattcattggttcctcctcatttttttatgccgcctgcgcctctgtgaacgcgggtatcaccagttttttataaatttcctccctttcctctggttccggcgctgctttcgcaacgagcgtgcattttgctgctttcaatatatccttctgtataaggtaagcccacacccagtcctcatattcccggtatccgcatactccgcccgtaatcatttctgtattgcagtgtttttgtacttcacaaacaatatccgccattttctttaagaaagtctcatcgtcaaatttcactttctttttgacccgggctaccattgcctccgcattgagcggctctaagtaatgaaccatacgcattctggacaaaacggattcgttaaatccccggcaccctttatatcccatattggttgtaatgaggattactgtgtcgggatgccgtttcaccacttctccactggtcagtgtgattgtcgcaccttcatccagcagtccatttaacttaaccagagtacctggtttggtaataacagaaggctcctggatttccaccagtgatggtcttctgcacccagtcacaataggagactctaccatgacaaatttcttatcatccttcccattttcaaatccattttgataaaacatggtcaggatttttctaaacgccccttcttcactgatttcgttgtcgtacaatccgcatatctgcgccagagcggaaaccgggtccatgattagatcctgatacgttggcatgggaatttgaatctttcccggccgttcacctgtattgggaaccatggaagataccagatccacttcatctgttccctcgctgcatgtaaaagcatagtacggcaatcccaacaactgtgctataatttttgcgtttgttgttttacctgtgccagcttcccctacactaaggaaaacccgcatggggctgttgataaccgcgtccataatctcctgtgcttctgctgatacattgtatttttccggcagcttaggaaccagatttttttcctcatcggtaagctcaaatttgcggtcatactgctcttttaattctgctattgttctttcacagtccttacattccagaacctgaaattttccatatatcgtctcggtcgggttataatctccatcggccagttgactggtaagaattaacggtacatttccagacgcaatactatccccgtcaaacaaaataccagactcaccgagagacgcactattgacaattcttcggtacagattgtcacagcatagaaaagccaggtccgttgccttatccgcatccggatatccattttttatctcatcgtttaacagcaagaaggctttggaaaattcatcgtcatgaagagaaccttctgctaagcttgcaaaaatgaacatcatgataatttccctgccgcttgccccccgctcaccaatctgcggatatgccgccagtgttgttccgttctttacaatccctttccatttaccatcctgtggatgatacacaccgattcttatttcagaaccggcagccacaggctttgcgtactccatacagtaccatttaaccgttcccgacactgtctgtacaccaaatgcgccttcctggtctcctcttataattgcagatacggccagcagtgcttttaaagtggaagcgtgcagggttgcacgcttcattcttgacatatggttatggacggaaagacaggatgcctccgttgtgtcttttttcccgcggtttgcagccacgcccgcaaatggttccggcaaaattctggtaaatgtccagttttcaaaaatcttcatcatcttttgatttcctccttcttatgcagcttcttgtccgggaatcagcccctgtctctgtgcctctgcacgcaaccttactgccaacagggtatttctcttgccgatatcactgttggaaattgccatatagagagctttctttgatccaacaagatgaacccgaaattctgcccgcgtgactcctgtataataaatatttcgctttagcatcggccaaaagcaggtaagtaccgggattatcacaattggaaattcggctccttgtgatttatgtatacttgttgcatacgctaactcaaggattgataactcatcttcctgatatgttttaatgacatctccaaaatccacggtcatttccatttccccagcctttgattttccaatctggacaacccttccaatatctccattagcaatctcttctgtattatgcgtctgcataacccgatcaccaacacggaacaaaccgtacttggtttcccactccgctttatcaacagcaaacggattggcaattccctgcagccggttatttaaagcagttacccctgcctctgttttagcgcgtagaggtgataatacctgaaccatatccaaatcaccgccgtttctttccaattcctcctgatatatttctgaaattttttctgcggcatcatatgcgtcttccacataggtaaaggtaaaatcatctccataaagaagattcttttgatttctgtttatcaaatccgcattccatatgatatttgaccccttcgcctgccggaaaaactcgtccagaaccgtaactggaatcacatcggagacaattaattctctaaatacatctcccggtcccaccgatggaagctgatccgcatcacctaccaatataagtctggctcctgtcttgattcttgaaaacagcatactggcaagcttcatgtcggacatggtaaattcatccgcaataatcaaatcctcttcgaggatttcgggttccatattgtccatctcatcatccgttacatataatgctttgtggattgtaaaagccggatacccagtgctctctgaaagtcttttcctggctctgcctgtgggtgcgcaaagtagtacagacttatttttttccagacgttcaaatatctgaagaataattttgaggatggtagtctttccttttccagggccgccagtgatgatggatacctgggaccgaaataccattcggactgcctcctcctgtttttgtgcaagcgtcattttactttttgctaaaacagcctctaattcccgctcaatattatacgtgttccccggtgaacggagcagcctgacaagatgatacgctgcctctttctccgcctcccggtatgcctttaaataaatagccgttccatctgcctccagaatcttatccttcattaccagctcatttcctgccagcttaatctgtccgcgcctgactgtatcagttggaaagcctgcattgagcaccttatatgccatatcgacaatgatggtactgtctaaatacagatttccttcttcagcgccctttctcaaaacatattgaatagccgctttaatcctttcaggctcatccggagcgaggtctttactggctctggcaatggaatcaacggtaataaaaccaaaccctttgatttcacaaagacggtatgggttttccttcaacagtgtcactgcttccagaccaaaatgctgtttgattttttcggcctttttgggtgtgacgtggtaaggtgcaagatacgccattaattcccttaattccgcactcttctgataggattcaataataatttccagcttctgttcagtaattcccttaatagcaaggagttcattaggatgattctccataacagtgaaggtatcggttccgaaccggttgacaatctctcttgccataaccgggccgattcccgtaatcaattcggaggacagataaccgatgattccctcccggcttttgggaaggagaaccctcgaccagtcaacaccgaactgaaggccatatttctcggaccttttccagtctccctccatctcaatctctacattatccatacaaggaagttcttttccaaatgcagtgaacgtcacctctgttccataattggatatgactgcttcacttggaatacaatccagctccatactgctgtattcagccacggtataaccattccccgggtttacatacagtcggctcttaaatttacataccatcggttctcttcctcccgcttaccttgaaacataaatgtatctcccatcattgactgcataaaatccgtcctgctttaaatattcggtaatggtattggcttgcgcgcccggatatccaggaagattgccagcccgtctgtaaccctttggggtgcggatattacagacaccatcggtacgaatccaaaattcattttttccatgtgcaaatatattggtagatatcgctttgattcgttcccttccgcaccgtgtataccattcatataccggggtgtccctttcgtcctgaccattatttccatcatccggaccttcctcggccgctccacttccactgccagactgttctttttcctccgatgatttaattatcctgattctccatttttttctgataagcaagtaatacactgcaaatggaattccaatcgataccgcattcacaataagccccaaaatcatgggagctgccagctgtaacatcacggtccccgctgtgcacattaaaaataccatgatgaatttctgtactttcttttcattcatcttcgtttatcctccaaaagcaggcggctagaatgcgccatcacatcctagccgtctgtattcatactgttaaatcaattaaacggaagaccttcttccattccactcgctacattcataaagtcatcgccggcagctgccctcgcagcccctcgctgggatgcgcttcttcctaccgcgcttcggctaggtgcctgacgctgtgatgtatttctgctggcagctggttttgcggcgccctgattcgtagctggcgctgctgctctggatgccgcagtggctgctctgggtgcctgtgttgcatttctcgtcaccggagcttctttggacatctgtgccgctgatgcatttgcaggatttgctgttctggacggagtcgtgctctgcgcctgcccattatctgcctctctctttccatcagcgaactcaacatcgtccgctttcaaagaaacgccatataccttttctccctttttatttgtgtagttatcattctgcattcttccgcttaccaccacacgcataccactgtaccaatactgttccacaaactctgctttcctatcgaatgccacacagttaaaaaagtctgcttctggttctccttctctctttggtatccggtccaccgccacagtaaatctggcaatcgacatctgggctttctctgaaaaactcacctccggatcccttgtcaatcttcccacaaatatacatctgttcatttgttatcctccttcgtttttatacaaacccacttttggattgctccatcttagcttcatgcgcaaaaatagacacggaaagatggtttctctccctgcctttttatacggcaatgccgccttctcctgtatcatctgttccccagatttcagccatctcctctggaaaggctactgcagccacatcccggtaccgtcttgctccttcatcattcaacggggcctccaatgaagctttcgaccaaaagattgcttcttcttccggtacatgatagggacctgtgagaaatcctccgtaattccaccggggtacggaaggctctaaaatcgcttccagctccccctttgtatctgcattcagtatcatctgacttttctttaacataatcccaagcaacaggacaaatgcaaaacactctgctccgtatccattgacacgtcttctgatactttctaaggcgctacaggcactaagcttcattctctctgtttttgtctcatcactacgcaactcttgttccgtatgacggcaaattgcttcgatgatgaattgttctgtccatcccatcatatccaatctgctcctcttttttcttcaggccagaccaccagtaatcatcaattcccttatcatttccagcccaaatcccatcttctctctggtcccaggtcttgcggatgcattttaattttagccggtcacagctctcatagagcctgcagcaacccgcacgaatctggtcccgctttttccgtttctcttcacaaatcttccttccatagtaacgctccttgttctgacatttaccacaagtagaggacttataatcaccatagcagccgatatccatgaatttgtccatgtcaaagtattccatgaccatctcaagaccgttctcctttaggactgccaatgccttctcaaggctcttatactggtttactcccggtgtccccaaaaagctgtatccggataaagcatgagcgacaatcggttttaatattccttccgttacccgtaccgtcttgtcaaatggatttccaacaaaactgaccggactcttactaccagcaccacgttttttattggtactgcttaaccacaaatactttttatcatcatggggagcatccaaccgtatctgaaaaccttcaatctttccggatatactgtaagccgggcataggattccctggttattccgatataacgcaatatcccagtttttgttttgattcatgtaaaatcccggtatgcccgcaagagaatatccttcttttatcagcctccttgcgagcccctcagtcccatgaactggagtactgcgaaaatggaatgcctcaatctggttgcttgttagcccccggtccatcagttttctccggtgagtttccgacagggacagcatctctatgagtctctgataaatctgacttcttttctcaagacttgctgtttcttcctcctctatctgtgtcatcgttcctgtgaagctgctgtcatagctgtttctgcagccagcgccctcatgcagcgccgtcttaatttcacgataggcaattttataccgatccacaccacaaattcccatcaggtctgcatagagtgtcagcatatttccatgagcgccgcatttaaagcagtgataggtatttgccagctcaccgtcttttacaatacggaaattcatttttcctctggtatcgccacagaacggacatacgacattaaaggaatttccttccgtcagcctcttaattcccaacaaatttgctacatctgatatgttaaacatcttttaagtattctttcccgctgctttcaccatgcagcctacagcgtgctcaaaagcaatctggcgccttgtcggattgtttcatttctgccgcggtaattataggctatccactccaacgccttcaccccttcttctccctgattgagcagctcactcagacatttattgttatagataccaaatgtgcaaacaatattgccagcttcctcaattgtcatatttacagccggctgtgggcttacttcgtttggcagattcaccatcgtcccattctccggcatgatatggcggctcagaaccggacggttcgtgtctcccttatctgccttctgtttatcttttgcagacttccttctggtcttttttgcatctgattccatacccccatcttgttgttttgctgtttcttccgcatccgtttcctcatgccctgattctgggttcatctctgaatcattcatcatggaacgttcttcagatgcatcaacttcgctctcctcagcttcctccatcggttcttcctccggtaattcatccggtacttcctgtccgccttccatttcagcgtccagttccatatcggttattccagaggcatctcctgctatcccttctgaatcccgatctgagaaatcatatgcatcagaggacaagccatcatattccggtatgctcccatcatatgtatccggtggaaaatcccgcatatccgggtctacaccgccctggtcgatgcagtacttatccattaggtagtatttcatggcatatgtgagcgcactgccttttgctttctccggcatttcatgggtaccgatggcgtggattgtaacggttacctcgtcttctggcttctctgcattaatccactttagttctaaatctgcctcatacagccacatttgacaatatgctaagaattcaacatagacagagtccccattctcgtttctctttgaagcacattccgaaacaatttcaaagttcacattccatcggttcattgccggggtcagatagcggaaaatatcatcaatctttataaaatcataattcacgtcctcactgtatgcgcgttttaccaatgcaggtatctccgagcggatctttaccattttttcctgtagtgttaaaatcttttgttccatgttcattccctttcttaacgtgtgatttgtattccatcataattgtctccacctggcctcttagtccatatgccagatctcgtaccatctcaaaatccatatccacaaacaatgcctgatggagtttttcctttacctttgcctgagtcacagcctgctgcaactcagtaaataagcgagattcttcactcgcaagcacataaccgccctgaccggaatataccacatcacataagtattttttcgcagtatctgttagctcacaggaccagtcattcggagttctatggccggcaaaaccggctttttcccgtttcagctttcttaaccaaactctaagctttaattccagaaaatgtctctcattatcagtcaaaattcctcctattttatagtaagacagagggtactgatgcaatcagactggcaatacggtaggattctccctgtatttctttttcctcttttaccacccagtcacaccattccactgcgaaccgagtcaatatctgctgaagtgtacggtcctccttttgcatagcaaccaggaactggcgaaatggattgcaaatttcccattctgttttagataaatatgctgcaaacagccgttcaactgattccgtctggtggccgctgaccgaaacttcattgggtgcagaatccccatacgtgacccaaggccataaattggtctttgaaagctctggtttcagtttacaggacaatttcacactgccctcatttcgttcatcccactcactactggaggataaacatataaaccactgcccaatcaacatcataaaattatgcctgattctgtagtcttccttcaacataagcttcataaaatccgtatggtccacaataacaacattgagatatcggccaaccaagatttcctgtaccttctttccatctatcacagataccatttcttctggctgtctcatttcttcgtccattttcgttttcctcccctaacttgccttatcctctttaatataaaaagactgtgaggtatttgtctgcgcatactctctgtaaatatccggatgcataagctgcagcacctccaggctgtctttattgatggaagttgtaactttcctgttatagccggccaaatatctgatattaccagtttccagtaccgcttcctcagctccctccatggcttcctttattggcgcataggcaagtttcatctgttcatctatctgatccatttgacgcttcaattctgacttccgttttttcagtttcagataggacgtcatgtttgccgcatatgatggtgggagtacaatttgtttattctcctgcacaccatagcgtccctcaatgcttttaagcattaagtcagccttctccgtatacttaggtggttttcttaaagcaacgcactgattccagaaatacgattcctgccgaatcagttcttcttcctgtgccaaatcacgctccaggcgccgtatgataagagaaccctcatggttaccatgaaggcagagaaaaattatgccatctacgttagccacactcatataatgaatcccctgaagaacatagtgcggcggaatattcccaccttcccagccattcatgtggtggtaactgaacgaggttttgcactccaacaaatagatcttttcatcaagcttaacgaaaaaatcaaaatcagatatcataaacggatacagcggatgccggaacattttacgcacagcatacggtctggtatctgtgcgtttcataaaaatctgaaccaccaattcctccagacgctttccgatttcctttgctacccagccatcatcattctgttctttgatttttttatgtaccttctcttcatataaatccctggctgttttccatggcgagatgccgcacacggccgccgcatcactccccccaatccccagtgttctgtataatttccattcgtcatgggatagggttgttatatcctccaccagcacatctggttcataattcagattcagcatattgtctcctttctgacagaacagtagggttccctgccctgccttatttctttcatcagtacagaatcgttcctgggatatcatattcatggaaacgataggtcaagcaccgtgaaaccatctcttccaaatcggttaatgcctttgcacccattccattgctctgtgccagaaaaatcgcctcacagattccacaataaatatcatagccattacagattcccggtccatgtccggccttaaactgttctaccgtctgggctgtcagcgccttactgataccagccttaatcataacactagccataacgttagccggatagctggcatatacatgaaacagcttcgacaaatcaccaatggcctcctgatatctggcaaatatctgtcccatattctgagagaaatcttctatggatgcattattcgtatgctccaatttcaatggttttcctaaaatcaacggcttcttctctgctcccagcagaagagaataatagatattcgcaccacttacgccaacatcggatgtctggacacgaatcaaagctgataatacgttatctgcctgtaagccatactggagcagcagttcccggtatgtatccaagagtcctttttcttccaattcccaggacgccattgccagagaatgactgaacaggccgtttgaaaaggtagccttgtcatagttttctgcaacatagatagatgctacttcaaataattccggcattggcaggacggaatagtcacttgggtctccgccatgtaccgcgcgcacctttccttcatgaattctcacaagcgcatttccctttgtcacattcagacagtcatttaatacccgggctaatttccccttcggcaaatccaatagcgcagaacctgcaatcctggccctgctctcgattgacttcatggtggtctgtccgaccggataataggtactgccaaggcataagaacaggccggaattcttcattgtatcttttatgatttcctctttctcgtccatgtcctttatcttctcgcaaatctctggttcttcctctccggcaatcacaagtacagtattggtgggatgtttctgccattctgccccgcactcaatcccatccaaaaattcgagaaactcttccttatcacagaatgtctttgaaaaatcatctgcaaaattcatatgcgccctctccttataagttaattagaacagatacaatatggcctccgctgataacaaactcatagccatcctttcccatctcaaccatttcgccgattgtgagctggtctctccctgcgttatcccatcttgcttctaacttcatttgttttccttcctttcttttatttttgtccaggctttatgcctgaaaatcatcattttttgctacatgcagtttcttatccgcccggtcaaacaaatatacaaggtcagaaagcttcactcctttattttcaatatttaaggcatgtatcacagctttccaatccgcaatagaggttctattttttctggacggaattaatataatctcatgaatgtctaccggaagtataaggaggctgtcattgcagctctctgaaatctgtcccaacagatgattgtcaatcatattgctggctccatacaggccactttgatttgacagcacatacatagggttcttctgttcctgatggcttttgatagattggagcatctcaccaaatgtgtttcctattggagctgatatcaccttccagtccttaatttcaaccatttcaatcaccggtggattgagatctgtatttgactttgccgtttccagcacgtcctgcagctccacttcccaccggtctaaatcctcgtttaccacggttctaacatacgattctccatccaccgtaataaaaatcaagaagtacgccaccatgtcatagtatctgatatgcggtatatacttcagcacttcctcattgtcttcgcgattgaccaatgcacaaacaagattgttttttacgttgctaaagctatctcctgtgagatatggaccatttaagaatcctctcttttttttgtactcttctatcacttttgttaccgccctttgaatgtcttcctcattatccagccaatgaaactcactgccgtttaggtatatccaaattccagctgattcaccggatttttggactccaaccctgagaaattcctcgtcctgtttttccattcgctgcggaaatgtcgctttatattccgctcccaagttctcctttaacttctcttcaaaacttgtcttacgcgtttccatgttcattttttctttctccttttctttttcagcaaaaaaataagacaccagaaacttcttcaaatttctgatgtcttacttacaaacagagattgcttctctgcctggctttcttatgttaggctcatgcctgaaaaacttagcttccggttgcccggaacaaacattccaatgcgcttagtaaaaaagcggcacaaatcaatgtcatgtttattttatcactatatatagtgtttgtcaatattttaaatctatatatagttatccaatccaatgtgattgctaaatcgcagcaattcttcatatcctctctactgtgtaatatcatgcaatctgtttatatcctctcctatagtttttctctatccagctaagcagcattttctctcccaattcctccatacagaaatcataaagcttgggattatatgctttcagccttacgaatttttcaaagcttgtcagatgacagcccaccggacagtacagacagccggttctttgttctcctgtgcacttaaacggcccacatgatggaaagaccccaatctgaccgggaacttgccccacttcgaccacctcaccataaggctctgcaatttctaactgtttttccactgtataccggagcacatcctgtgctctccaaaatcccattggcttactaagtggcctttcgctttcaaagctattacagccagtacgaagatatgcttccttgcgcctggcagattcctctgccataagtgctaaaatgggatgccgtccagtctgcttctcatacagggcaatcggctcctcattctgcttaacacagcagtagtgtgatatcagaatatccgattcatacagtggtagccattttgtatacccctgccgatactcggatttttttccattccgatccaatccatgcaacttgttgagggcccattcctttccctgccacgcataccagtcttaggtgtggaaatatagtaacccacctctgtatcacgcaatagctggtggtctatgttaatcacacggttagttcaatgaagcaagatatacttcagggtcaatagaaggatagtcttttcggcttgaagagcaatcgtatcaaatccaagcaggaaaacagaagtatctgttataccagcgcgacgagccgctccctgaaaaaattttgtaaataatgtttcgctgatagaggcggctggcaatgtaagctgaatcctcgtgaaataaatacacgctccataatgcgaaacaggaagcgaccgatggtcgttataaggaggtatcataatatgccaaaaggaattatgcttacaccagaacaacaagaagagcgccgagaagaaataatcagtgttgctatgcagctcatagagaaaaatggattccaaaaaacatcaatgaggcttcttcaagtaaggcgtaattcctttctttctccatctttggatatatctattatgatatatcaaatatttcttttaaaattccttgtaactcttgtgttggtgcttctttacaaaattgatatagccattttttacatcttcttatttcacgttcaaagctatcagaaaaatcctctgcattcgacttatcaatatcctcttggaattgattataaaattcatcccaaaattccattaataaattatagaatttcaactctatgagtatataggtaattctatcgaactcctcatacgttatattatttccttgagacatttcttttgccgtttcatttccgcataagtagtaaaacagtaatctttcaatatcagcctttttcataaataaatatttttcaccccattgtataaaattcgttatcacgaaacattataattcttaatggttataaaatcaagaatatatttcgttattacgaaacttacagacataccagggggattatatatgcaaaaactaagaccagatatggatattggccacaacattcaatttctgcgacatttagctggtttaacacaagatgaaactgttgccaaattgcatcttatgaatcttaatatctctaagagcacttatgcaaaattagaaaccaatcgcatgaatataaaagttagcgagttagtagcattatccataatttttaatgcgaattttgatgatttttttcgtggcttacgtgacgaattttcctcacattttgattgatatatttttaagagtgaactctccattgtctaaagccaatggattttctgcctcatcgacctctcaatctactatctccacaggcataatttcgggcagtccatgccctatctaattgactgctctttctcattctttttccattcactcctttttgatcaaaaagtaagacaccaaaaacttcttcaaatttctgatgtcttacttacaagcagagaaatcttctccgctaagttctatccagtagtatgcatctgcctgttttcattttaaacatatttaaaatctcctgtttctaaccacattactttttccttcaacaatagtggttggttgcatatcagggaaccataaaaattaaccagaacaccttttcctacccttgctggttctgcctcgctgtcgtcatcgcccgccacctcatacagatattttccatctggtactgttgccctgtcgattctcatatcatagaattcgcaaacaatacctttgacttctactttctcagttttaatcttcctgtaatcgtatctcatacatcctcctaattaaatactctgatctcatatttgttctctttccagatatcaggcttcttatacttcttgtctctgtttacttgattttttattatcttttcctaaattaccactctcctttttggaagcaaaaaaataagacatcagaaattcgcaaggatttctgatatcttactttacagacagagactctgcctggctcgttcatataaaaggcttacgtctaaaaattagcttccggtatagataccaccggaacaaacatttgaatgtggtttataaacacacacaaatcagtactactttcatgatatcactatatatagtatgtgtcaatatttaacctccacatatggtttgttcaactattttcagaagaaccgtgccatttctgacttgatgaaaagttttcgtccatgattgggaggcagatggatatacgggttaagctgaaccccattgaccagcgattggctactctgaaaaagcatatcgagccaaccgtcctctacatgaaatataaagggaaaaggcgttgaccgatacggtgcaagcgtatttgtggcggcacaccgctacctcaaaattaatcccttaccaccgataagactattttttagcatctcagccaaaatatccatcaagttcccccgtatccgtgatatgcataagaatctgatgctttagataattcatcttatttctcttaaccgtaaaaaagtttcatataagttcagagccccatatccccattccctattgggatatgatagtgctggattccgttttgctcctcttattaaaaatgctttgacagtggcttcgctcattgctatgttatgtccttctattatgccccagcttaaaagattagcgactgcaccagcaacatgggcagcagcaaccgaggttccggttcgggtagtcatgggaatggagtcttggttccttcgccctatcgatggcccgcttacattaacccctggagctgccaaatccggttttatcaatccgtctattgtatatccacggccggaatgaatgtagatgctgttatttaaatgattataggctcctactgtgattggagagggagaatctcccgggagggttatggtcgtatatgggctgggagtcagaaacacggtttcatcagaaatcaaggtatgggccggaagccacatattaaattgccctgtaagatactgggtattatacacgcgtattctccaaattccattagttggggcttcaaaacggataaaaacaagctgtttgcctgcgcctgtctcaatcagctggtaattaactgtaatgaccgtgggttccaaaaggaacgggatagaggtttcgtttctgcctatgataggaatgcggcctatggattcaccactgggtgagacaaatccaaccgaatatgtatcagcggtgtcggcccagagttctactacaaatccacgttgggattccgcattccctactcggatttccacctcaacggactcttcccctatcggtacagaccccatgtaatgatgcccccggccagtttcattgcctgcagcaattaccgtagccattcctaaatatcggctgatatcttgaatcattacattcaatggagacgtcccttcatggctgcccagattggagccgattcccagtaaaataaccagaggttttctctggctgtatgcctccacacgcaggtacttaatgcccatcattatatcattctcctgataagcatccgcatcattactgataagatagaaatcgcgcagatattgtttggctggttttaatttgacgattaccagttcacattccggtgctgctcctgtaaaatcctgattaggcaggattcctccagcagcgatacccgccaaaaaggttccatgtccgttggtatcggtagaaggcaccacggcaaacggattatcagattccagtgcctcgttaatctgctcctgcgtgtactctgtgccatagcttgccccgctggcattatagcggttgggtacaccggcaggaaggaggcttttatcttctggaaggctctgatcccaaatactcaagattctggtagttccatcctgattacgaaataaaggattggtatagtcaattcccgtgtctatgatgccgattataacacctctcccttgattgctaagggcaggtgatgcatgggttgccaaaatgccggaagcatccatgctggaactatctaacagtgtgtacagtccagggatactataataggtaaacttacttagtgatatgggttctacggtatctagcggggtatatataatgctgaaatcagtgcttacaaagtccatacagggaatatcttccgaattaccaggaaattgctgctggcttccattacggtagataaagtcagcaatagtctctgaggctgagttaatagggcagtccgccatggtgtacctcatgcaggggatttgatacagtatatgcgggattttggaaacctttcactattggcatcatatagcaaacaagcgatggacactcctgcaagctgccagcgcacattacagcagatggttcccgcctcactttttcccacaaagaaaaatatcatcacgcaccatttgcctgttagctgtaataggaatatcaaaaaatgtgatcaaaaccaaccttcttacattctcagagcatagttagccttttatactgctaatgaagtccacttatagcctttttcactaagcatagctttcatcaatgccgtacctatacacataaatggaaattgcaagggtgtttcatcatcaatatggagagtatgattttaccactagctccgaagtggatcagcaaagaaaagagggtaaaccgtatacagatatccatctacaatattaaatgatttttcgcttaaataattagtcttcaatcagagtaactttgaaaacaacatacccattatcaggacaagccaaatttccttttgactttgggttttcttcaaaattaaaggtagctccattgtgtagggcgacttgaataggaaacaaagccatgtaagcacctccacaaaatggagtacagggagtattcataccctcacattggaatacgtcccctaccttatatccacatgaacaatgccctgttaccttttcaatttgatattcaaactttttcacttttttatccccatatttttatttgtggtaatatgctcattttgacacttgcagcgtcaagtgcttttacaaaaggggctgctccctcatcttgaaacattttatcagaagcagccttgagttcttccattgaagcccaatgctgtatcatagtccattccctgttttcttcgttatagagaagttccgtgtcaataaaaccctgttgctttgaatgatagtccttttcaagcgagtccacaatgctgataaagctgtcttttgttacctcctgtaaagttttcattgttacgatttccgttgcaatagacataaaaatacctcctgtttttttcatagtctacataaaatagaacaagaggtatagtagaaaatcgactgtcataggtatttgtatttaacattctcttttacagtagctttctctgtctgaaaggtgcgtggtgctgttcccgaaaaacgtgtaaactcttttataaaatatgattggtcagtaaaattattatcgtaagtaatatcggttaaactaatatgttgatgtactaattgattacatgtattctggaaacgttttatacgacgcaaaattttcggagtatagcccgtatggtataaaaccattctctcaaatgtttttatgtttattgaccgtttatcgcaaaaggatttgatagatatatcatcactaattgttataaagtctgatattagctgtgctttgtccgcaaaatcttgctttatagataactcctcaatcaaagtattttcaatttcagctatgattttttcagtagtatcattacttactgctttttttaacttttctcctaaactgtatgaaagcccgtttagatcaaccactttgttttgaacttccttaagtgatttatgcacaaagggatatagcccatgaggataaaatgatataccaaaaatacgaatggttttttcttgatggataaaactgtacttactacgtagtccattgatatgaaaagggggtgctataattttattacattctgtttcatataccacatcatcagccaaattcaatataacatcaatacaatctgttggaagaagtttatagtgcatgtctgcatttgcggcttcaatgtgccaaaaaaatttcacccacggaatgagacattcgtttttagttgcataacgggtaatattcaaaatgttaatcacctccaatcgaaactttctatgtatcattataaatgtttgacctcaaaatatcaacatattacatgcaaataccatgttctattctaatcaacactatgatatgtgaactaatatccaaagcagaaaggtgaacggtaaaatgtaataggatgaaaaatatgaagcaggacaaagtaaagtatgattttaagactttcgggcaagccattaaagaagcaaaaaaggcaaagggcatattgcgcaaccagttagcggacagactgaacattgcgccgcgttatattgcgtccattgagaacagcggacagcacccaagcctacaaatcttctatgagcttgccacctttttagatgtgtcggtagaccagttctttttcccgaacgtggaaacggaaaaatctaccgggcggcggcagcttgacagtctgcctgccgatatgagcaaccgggatttaacaattataacggcaactgcaaaggtaatacaggaagcccacagcaaggaaacctttgctgtggggggggcacgcgatagaaaggcatttttgaggaaaaaggtatatttcccttgcccggtcaaaaccgcgcccgtaaagccccatgatacaaggcttcctttgcccctactgcgtgacatgagggcataaaaaagcggcgttcctgttttcccgtgtgggaataggtaacgccgcctgtctggtggtgtgttgtgtttctctatttgattgctgatgtgccacgccatttccaaacggcggtatggggtctatcttcaaaaggatttcggcggcatatcaaagccaactccgtaagtagtaaattggtagtaaaatcagcctacaatcctttgaaaacgcccgtaaatcaaggagtttccgagataatcattgaatttatagaaaataaggacatagcgatacctccttgataccgccgtgtccttaaaaaaggcgaatttaatacaccctccgtaatccaatttttgaaaaaggaaaacggcggttttatttcaactgccgttttgcgctgctacacagatagcagttttcccttttagttgctctttactaatcttcatcattatgcggacgctttttgggattctttttatcgttgtattttttcataataaccattttaagtaagccaacgacaatcaaaaccgcaacaatgataatccaccagtattgttccataacctacttcacctcctttcagtgctcatcttccccgtcctatgcagaatggagaagttcattagtattaacatgtaccatacaatgtttacattgtggaaagttgtgttcaatcacctgatggactccctcggcaattctgtgagcgtcataaagaactaaactgccatcggctaatatttcaatgtctacatacattttcgctccaaacatacgggtttttaaatcgtcaataccctcaaccccttgctgttgaagtacaagttcccgaatctttgtttcagtagtgttgtcacagctatgatccaccattttgttaatgctttctctgaaaatgtccaaagcggcttttaagatacaaccgcaaatcacaacgcttgcaatagggtcaagaatggcataacccaaacgcgctcctaaaatgccaattaaagaaccgactgacgagagtgcgtcagagcggtggtgccatgcgtcagccataagtgcgtcagaatttgtatgctttgcagcacctcttgtaaaccagtacatccactcttttattacaatggataagactgccgccgtgagtgcgattctaccgggtacggaaagtgtattgtactgccctgaatagattttgttaatgcctgaatatccaattccggctcctgttacagccaatgcaacagcaagaatgatggaagccacacattccatacgctcatgcccataggggtgttctttatcaggtcgtttttctgatattttaattccaaccatcacaacgattgtgcttaatacatcagaagccgagtggacagcatctgacagcatggcgcttgactttcctatatatccggcgacaaatttaagcagcgataaaatcaggttgatgattagtgtaattgtggaaacccggattgccgtatttacattttcgtttggcaggattttattttttttcatatatgcccccttatcctgccagcttccgaaacagacgttttataaggaagtagtaccagatcaaagctactaccaatgctatgggaaaataaagaactgcttcattctgtacggcttttgctacccaaaatgatgggaggaagccaaccgcgaactggtagtaactatctataaagaaaggaactggaatgcctaacagtgtaagtgcagaaagttttgttacagccataccctctaatttattaccggacaaggtaataatcataagtgaaacaatgatcgcctgtaccgagccgagaagtgctaaaccaatcatcatactagtgggtaccttttctaatgagaaaagcaaaagtacgataaaagcaatgaccgctgaaataattgcgggtactaccaaccttgtaaagagataccccgccttaccaagaggggtaattgaaaagtaccgcgatactttatcatcaatttcctctaacgtaatcatggcaaatgcaaaacaaagcagtacaggagccatgatagaaagcaataaatcaaaaatcggatagtatccttgtaaagaaaactttgttattctttcaaaaaatggaataccaaatttgattaaagctcccataataaaaggggtgaagcaagccgcaaacatcatagggtcgcttttgatttgcttaaatacttgtatggcactggatagtatccttttcatagctttacacctcccaaacttttccacatatgctcaactgtatcccttgcaattatgtagaggataatcagcgtagcaaatacaattaccatatcgaacgatagtaacatactttttccagttataaggttcatacaagccatgaacggaaaaaagcaaaacacatttggtaaagtcacaaacagaccagcaataggtggaacaaagcaaacaatttctatcggcataattacaataagaaactggttcaagtttgaaatctttgtagctgcaataattccaagcatagtaaagattgctgatgtcaaagcagtaccaactgcgataccaagcaaatgattgctgccggaaactaaccctaatatcaatgcaattaccgtagaaatagcaatcaacgcaactgtttttgaaagtatatattcagatatttttacaggagataccaccatagcatttaataccttttgacttttttccaaaagaacaatcgctcccatgaaaaacaatcccattgctgccgggtcagagtatatcataatagaagcaatatccgttttccaatgttccggcaaagcggcaatcccacacacatataaaacggttaaaataaagtagataaaatagaaaccatatttccattggaaatgtatatcaccacaaattaaacgtcccaatctcattgaagtgtcctccctgtaatatctacaaaaatatcatttaatgtaggctcactgctatgaatggaaagcagacggttttcggaaattaagtttttcaataacttatcttctgtggttctatcaagcagacattctcccgttttctcacctttgtcatagtaggtatattgtatttttgcagccccccttgacataatcaaattatggggactatccaatgcgcttacttttccggcaacgataaaggctacctgatcacatagctctgttgcgtcaaacatattgtgagtagtaatgataaccgtttttccacgtttcttttctgcaaggataatatctttcatcaaacgattattcgtagggtcaagaccgcttgtcggttcatcaaggaataatatgtctgggtcatgtatcaacgctttgataaaattcaagcgggaacgcatacctttggaaaagtcgccaacctttttgtctccgtcattttccaatccaaccatatgcaatagttcgtcaatagaccggggctgcttttcatacagagaagcaaaataggcgagattttgtcgtgcagtgaatttctcataacaggttgaaaattcaaaatcaacaccgatattttcataaaaccgatttgtacgctcccgtatttctgtacctgcaacttttacgctgcctttatattttgtattaagtccggtcaaaactttttgaatggttgattttccggcaccagaagggcccaaaaatccaaaaatttctcctttcccaacatggaaacttacattctcgacaaacggtttatcagtatagctaaaatacattttttttacatcaatcattattttgtcctcctcgaactttatgactcataaaaatatatagtcatataaactgtaaaaaatatgtttggctatctgcctgtcaaataaccaaacaaaattgttactctgctactacttgttgaacaatgccattcactaaaagattttgtatcatattcagttctttatcctccttgaactgttccaaacaggataaaacagaatacagggattttatgataaccgtatgcggaatcgtaaaaataacccctaaatcttcaagcatttccagtatacgtatatcattgtgcatatgactgtcaaatatatctggcgaaagtttcctttgcagatagtccattaaagacaaatcgatctgcgaaagaataggagaattaatcaacccagttacccccaaagtgataacatcttttgttaagtccctatgattttcatactttcttcctttaattgttgtttcaatattagtaaatagctctttctgtaagcgaaaattgatttctacatataagtgttctttactcggataaaaagcgtagaatgaacctttcgatatatttacagcagctactaaatcatcaaccgttacttttttcaagccgtgtgctgcaaacagcttttccccctctatcaaaagtttcctgtttatgatttctttttcttgttctgtaaagcgcggcaattttcctcacctccttatgactaaatattttatatcgtcatatagaatatatcacttgctttctttgttgtcaagagatagtctaaaattattttataaaaaaaatctggcatataaacaataaatcatacaatgattttactacatacgcttactgctattactactgaagtagtcaagcaggatacagctatctttgacatacttcaccctcagattactatatatttctataactcatcacatttcctccacccccagcaaaatatcattcttcaagaaaaatcggtacacaatccctttcctcaccccgctctgaaccggtaccagaagccgctttgccttgccttccccatctaccacctcaatttcccaatatctttttctgcccttacagttttgtatcagggtcacttctcccaccagcgtctcatatttcttctggaaaataacctgacaaaggtatagaaagtaaagacccaggccggtcacgcacagtattgtgagttttaaaacaccttctccctcctgatgaatctccataaaaactcccgctgccaggatgcccagtatgacacctgcatttatgattagctttttcattaacatttccggaactcccatccattcatatttcatattcatatatttctgccgtttcaggcagcctttcttttatggtctggtacataacctgcatcttatcctccgggtaaccaaatgggctgacatagaaaagacaccgccggttttctccaaacccacggatttcactctcaccaccttctggaatctgtagataaaaaccacctgctttggcttcccttattagcacctgaacttccttaaaatagattctgcattgctcgtagtgttccttcttccaaggttgccttgcaacaaaacaactggtctgaatttctaagcagcatcctcttaatggcataatcaactgctttagcttccaatagcgaattgcgcttccaaacataccacacaccccaagtccgatgaatggtccaccaatgatggccgaaaaacgggccgcaagaaaaaacagccccaatgaggctgctattccaaaaacagttatcataatcaatgctctatccctttgatccattctgtggtacattggtttatctgatggctctaatctcatgtgcttatgcccccttttatgcagctctttttcctttccaattttctaatactcgctcacactccatgatggtctgctcacacatataatctgaaaaacatccgatgtgtgtctctttaggcggcaggtttaagctgcaggataaccaggcataaactccatttttgcacatgcacccactttcaatcagtctgttcatggcacgatgcgcgcggattcttttattacgaagttctttatccgccaaagagcccataggctttttcgttcctctatgaactcctacataggaattgcaatccggatatccgctgcatacatacagcatgcttcctgcaattatcgtatcatcaccatacacatactcggctggccgcataacagcgtctcgtccacagtaaggacaaacgggcattgcaaggttaggtttcttacgcggatgtatccggactactttctgtttttttttcatttcttctatctccttcctccttaatataaatctattgtataaaacggttattccttaatacaagggtatttcataaatttattatggggagaaatatgtcccattcctcccctctttgcttatacgttttgattctgcttctttttccgataataggtatatcctgcagtacctgcaccgacactggtaacaccaatcacagtggcgaccgctgctccatggttctttttaggtatgtaaacccccgttgctttcatggtgtattgctctacctcttcttccccgctatcataggtagaaatcaggcgtacgccttcctcctccggaaaataggcacttccctcatacatcactgtgcagtcactcaccttcttggtaccagttataacaaccctacggcataggatacccgcttcatctgtgtaagcttccccatcccaccttgctgcttctatggtataatgctcagcatcagcctcaatcagagaaaggagctgcccttcatatccggtgaagtctggttcagtcccactcagtttaaaaacctggtccccaatccaatagccgtccagcccatattcatggaacacagctgaaaaggaaaatgtatcgtccaggcgctccccgccaaatgtctggtcagaaatttttgcaatagtctccatcatctgcccggttttctcatctgttaccgtcatcttgatttttgacggtatcatgtccttggcttccactgcttcatataagacttcctcacttaccggtacctcatgagcccgtataacggctgcttccttctgggattttaccaaatgataagtaattccattccgggttatctgttctttcggcctaacctccacttttccatcaataaacgggcttgttgcgatttcaaaagaatttccagaactccttttcccctgttcttccagcacttctgtccggatttctgagagacggtatttttttccgtctctctcaatttctttttcaaacagcttttctgcttcattagaatcggggttttccgttgtatactggtgttcctcatatatattttcaattacatcttccgctgcctgagactccatcaccggcgtactaactaccattattgccaacaatagaaacatgccagcctttatccctgtttttgatttcttttgtttttttctccactttgagagggaaacaattaacaggcttactacggatgcaagccatgccatgaacacccctacaaaatagctggtatctcctgtctttggtgcatgattaagttcaccgaccattaaatcaccctctccccttctatttgtctcataactggccgtgattgttccgtaatgtttctgatcggtaatggtattgtcgccaattatactgccgtcctcaaacaccgtgaatgaaaagaccgtctcgtttctgtcatacccttccggtgctgtcagttccctgaaatgatattcccccggagacgggaccggaaaatatacttttcccttttcatcactaatgccggagaagatatggtttccgtcctggtctgtgacctcgatctcggcgccaggcagttcctctgctgttgttacatccactttagagattatcatttctgttttactgtagttttccatagtcgtatccccttctatggtcccatcttcagttactgcaaacgcatgcagtatctcatttagatagtatccctctggtgccttcgtctctttaaatgtataggctccttttaaaggtttcttaaaccggaatgttcctgctgcatttgtaaatccttccgcatagacactgccgtctggattgtaaacggtaaactttgcccctgcaagcttctggccagttcttccatcaatcttaaacagttccatatactccgctgagggtctcgggtgattcggagtgctgccaccgccgccacctgaatgggtgattttatagttcttgaccacaaattcctgtatcgcctcaatatcttttatttctatttcctgcggctccattttctcatagccggagggagccttcacctcacgtattatatacgtaccgcccgcaaggtttttaaagtgttcagcctcaccgtccctggatgtccattcccggattactgtaccgtccgaatctcttaccagttgaagaacagcgccgcccagcagttttcctgtttctccgctaacctttcctatctctatctggattggatggtttttaatatcaaaatgctgcatggtctgattaggaaggatctcaattttcatatcctccattgggacatatccttccggtgcctgtgtttcccttattgtatagataccagacggtattcctgttaggataagcggctcctttcctgacacccattctttcattacagtttcctcgtttgtccccgcagcctttagaagctgaagaaccgctccttccactgggctgccttccaaggtgtccgtcttctggagttccaccacaatcttctcatttaccaggttaatctcctgcttttcctcggttccgctcacgcaaaagtttaaacgccctgttactgcatagccctctggggccgtcagttccctgattgtatagtctccgacagaaagtcctttaaaaatttcaggtatcttcccacttacccattctttcaataccatgccatcggcatctcgaatcaactgaagtcttgctcccgccaggttttctccggtctctttatctgtttttgccacttccacttcaagtttccggtttgtaatggtaacggtttgtattcccgctttctccaaaatctcgattctcactggttcctttaaaagcagatagccgtctgccgcctggatttcctccagtatataccagcctgcctttaagccgcggattagttccggttccccagtggtaacccatttcgccacctgatttccttccccatctgtaagctgcagcactgctccggttaccggttccctggtctcctcgtccagtttgtcaatcatcaattcggtcatccggttctccattacaaacgtctgttgcttataatctttggtcacggtaatccgcatgggaccttccggtatctggtatccttccggagcctctacctctttcactaagtacacgcctgccgggagaccgaagaactgaatcgctccggtttcatctgtaatccattccttaatgatttccccggacgcttgcaaaatcagctgcatcttcgcgccctttaaaggatttccggtttcactgtccacctttctgatttcaatcttggtgtcatcatcaaacatctccaccatagggatgtcatccactgtcatgttcccggatattgtaaagtacactttctctgcttctatatacccttccggtgcccgtgtctcgattaggacatacattccctctgtcaggcattccagtttgtgcgggacctccgtggaaatccagctttcaatcacatcaccgtcaatccgtataaccgttccgtccttgtcaaccatctctgtgactctgcgaacctctaagctggcgcccggcagttcctcctttgttgtaagctgctttttagaaatgataaccctattagggctatccgctgcttcatactgataggtgagcgtctggtactggtctgtctttatattaaactggaagtcgtggactgtcgggtcaagcagataaccgtcaggcgcttccacctcctgtatccggaaatgatagaggcttaccgccccatccgttcctatccctccaacggggaccggggagctgactgcccgaccatcggaatccgttatcagaatggtcgccacattggtatccagattggacaatcggaaccttgcacctgataaaacttgttccggactccttttatcggtcttgataatctcaacctggcccagaatcagttcatttaccagttcaatcttttgaatatccagtgtatcaacaatcgcaaacggcagttctgcagccctcacatatccaaagggagactgttcctcaacaaaatagtaattccctgcggctggctgacttaactcatgaagccttaaatccccgatttcataaccttccggtatcctgccttctttctggtcccgcttcgtgtatgttccgtctgagccggaaatccagcgttccaccagatacgcctcttcgtactccatagccggaatatggttcccgtcttcatcctgcaacagattgccgtccgtatcggttacatacaacagattcccgtttttgtctttcatttggtgtttggcaagtgtaccatcttcctttgcacggtagacggcaactgtggctccggaaatttcttttccacctgccacattcacttttgtcaggagtacctgaatcggttcgtctgtcatggtaatggtctgcacccgttccttagaacccacatcaaggactggtacataaaccggtgctgccactgtatagccgtaaggagcctgctcttctaccaacacatatttccccaccggaagatactcgaaacgcatggctcctgtctccgtgatatagcaaaccgcctgacttgttcccggaacctgctctatctcataatcataggccgtgtagctgtgtccacccggtatggtaacctgatgggccgtttttctcacatcacttccatcatctgtctgccattcatacaccttcttttcctgatgatagagtatggttccatcatctctatactgcacttccccattctcatctacctgggcttcgtataaagccagtgtggcccggtgaagattatccatcacagccccggtccgggagtccagctttaaaacctctaccgctgtatgatcatcttccattacatagccttgtacttcaccggtttccaatatggtgacttccacatcctccgccgtcacatagccggcctttgttggtactcttgtttcctgaagaatataatctcccggcatgatatggtcaatccagtgtggaacgtttccttctgacacccatcgttccgctacaatcggtttgtcctccatatcctggagaatttccaaatgccacccccggtcggaatcatcatagacgcggtatgcttcgtagagtgttaaaaccgcgccctcaatctcttttctggaagtcatatcaagctttgatacctcaatctttgtgtaatcatcctccatcacataggactgcttctcgcttacatcacggacaatcacaccgactgatgcggactgtacataaccgtctgacaacggggcagctgtctcctccaggatataggcgccctgctttactcttgcaatttcacaggcaccatggtccgtcacccattcattctcaatccatataacaccgccatccttataatagataggaagcccgttttcatctggtactggctgcaaatccatgttgatagatgaatttccttccccgttggtatatacttctacggattgggaaatgattttatccccattttcatcaagcggccagacaatcactgcgccggttttatctgtcacataagccatacctgtttctgaatccaacatacagagacggttcccccagtcatccagtccatagaggatgccggtctgttcatcaagttctgtgggatcatattttaagtcaaaataccatatgtccacgggtggattatcctcttctgtaatatcccactccgcctgccctgctgcgtttgtcccagtctgtcttatatcggtatccacgccggtatcatacgcctggattcccgttactgagccaaatagatttctcttcaccttgactttctcatactcgtgttccccagtctgctttacttccagcccctcatacaatgtcagtgttgcattctccacatatatcttctcctgaccgttttcaaggcgttttgtcacataaccaaacccggcaaattccccattgggtttatactgtaaatccacgtccccgcggttatttagctgcttttcatctccctctacacggtatgtgacggcatccgcacggttttccagcttatgtatttctatatgtgtaggtgcattctttacaataatctggtgcatatcctctacaacggttttcccgtcagcgccaatgggacgcatgtactggtattttaccgcctgcgtccttttctcctgattgccgtcttcataatattccaccttgtcgctgtataccgtaaatgcaataggtttcgacttcacatatccatccggtgcctctacctccaccagaacataagcgccggcgcctaacggctgatacgtttccagataccccacgcactgcttctctgtatgcaggcttccgtcctctccttcaacttctccgtcccgaattgtggtataagccttaaaaacccctacttccgctccggtgtcgtcctgcatgaaaatctgttcacgttcctcatagagaggcgttccctcctcattaaacaggatatccccgcttcctgtcacaccggaagcaccatttccaatcacgtcccttttggctgcataaatcttaaagagtgctccttcatgcagaatattttctccagtttcagaatccaatttctcaatcctgagtctggagctgtaaaactcattctcaaaatccttgactgcaaaggaaataaaattaaaggttccatctgtctccaggccagcttcccggtttccgatatcgccgtcatcgttgattacttctccatatctgggatctaacacactccagggtacaagtgctttcgcgtacatccggtccacggcagtagactttccggtcatggtaaccactccattcattgttacaccataatccgctatcgttccatcccggtcgtaataagtttcataatacacctggtctgcacttccagcatcctcgctgatagagccgtaatgataatacctcgctactgtctcattctggcaatcccttctgctgtccggctccagaccatacttaaacacttcaaaatcgccgtcattattatgcgcatatatgatatgggtttcttcattaaatcgaatctgataacgctcagtcaattcctccggtgtcatggcagagtcgtaaagatattccttagatgggattttatcatgtactgtaccatcggcatctatctgtggaacaaaaggaatctctacctcctgaggcgcatcaatctcataatgtttttgtgggatgcctgttggctgctgctccaccaaaacatatgtaccgtaaggaagcatcctgctttgtccccagtagtcgtccttcccgccgccccggtttgcatgtacggttgtcatatccccgtctgcatcatacttttccaaatcccactcaattgcaagctcagacgcagcatcgggattttccttgaaaaatgttacatagtcataactgccatcttcctttttcataagcttgtctgttttctctaaatcagaacgcagatacagtttaaagaaaaagctgggaagcgtcttcgtctcctgtgttccgttataccctccaaaaagaacggtaaacgggtcacggtgaatctcataggtattatgctcataggagtccagagcaatatcctttttcacctcgattgcctgtttaatcacccgctccagcataataaccggctctttccgtgtgccgttatcttcatagatttcatactggcccggatagaataatacagggaactttagataagagccactcttctgtgcaggtttggtcgtcatgacattcacggttgctgtatattctgttattttctgttctgtcactacccggtaagttctctcatgtttttccccctctgtaaattcctcgtccgtatccacatggatgctcacctggccctccactgcggttgtctttacaggggtcagaatttcctcataggaaaccacctcctggctggtatagattggaaccgcctccatctgcgggattttctgtccttcactgtccaatatgaactccccagtcgcataggtctcatagacaggtgcataaaccgtctttaacagaatttcgtcttgccccaaagcctccaggtccagttcctttttctctactgtgaagcggtaaccatccatatcatactgtccctcttcatagactgcataataaaccccgccctcatattcctttcggattactaaaagaccactgccgctttcataaatggctgtctggttcgccaatactttatatccataacgaattcttgcataccaggttcccgcctcctcatatactgcctctacatcatatgcatcccaaaaactttccgaggagcagaaggtcagaatctcatctattatcttcccatttgtctttccagataatttgagttttttaaacgggtaatcagacagcccactcttataccccgaaagagcaagagccgatgacgtctcccacaaaatataatcctcgtcaatatcttctgattcttccatatccaaatcggacggttcctcccgctcaatggatgagatataatcatttaatcggttcactgccgaaaccgtttgggtgagcgcccggtcagacaacaccggattgccgctatcatctgattttataatcttattcccggtttcgtctaacttgtattctccaccctcggcagtccggtacaggatatttccctgcgcatcttttttctctacgcactctgttccggttatcacctgctcctgtgatgcagtctcttttcttgtcacctcatatgccttgacacgctccgggagaccggaaagcagaatatcgaaaccctttgttttataatatttaaccgtaaaataataggaatcctcaaaccattcattaatactatgggtaaatccatctgtataggcactccctgacgcggttaagacaataggctttcctgttcgattgctctcagataagttcttgccggttacagaacgttcataaccttcagagcgtgagatttcttctatataataactgcctaaaataagcggacgtccaatccagccatttccattccgcacttcattattcgtatagagattcggtacctctcttgaggtttctgatacttctgttatggttaagaatgaagcatcaccatttttatccgttgtggcaatggataccaactcccccgcagaaaatacaacaccggttttcccatctggatgcctgatgtcctctgccgcatatagtccatatacagcgccctctaaggttgcatctgcttgggcttttccatagctgtcctcttccagctcaaaaagttctttatcccgcttattaatatgcagctctccttctgtcctgtgatccttcaccagataagcgtaaccaatgtacccggacggatagctgccttgctcaatcggtgccacttcactgtcttcctggacaccatcccattcccagtgcccgcctgttccaacttttatagaggccgggcgtgaaaccaaataggtggacgcatttgacggtgtggccacgtccttttctatccctatctgggatctggttgctacggtaggaaggtcctctgttatggtctcttcttccactgaatcagcttcatttccagaatcctgcgtttcagcttcaggactggcctcttcatctgtttcctctctgttttccattgatggctgggatgcctcatcagactcttttatttctgttgtatctgctgtttcctctgacccggcctccacctccttctccccttcctcgccgttctctgctgtgtcaccggaagattccgattcatgtttctttgtgttctcatattccttaaaagcatgctcttgttcattccctttatcctcaggtattttttcctgtccggtaactgaatcactggtttgattcccttcatctgacattcccgcctgaacaatatctgtaaccttctccgattttgacaactgcggcacatcctccatctctcgaaccgaaactgcccgattgccagggtaatagccggtaatggcaccctctccttctgactgagaagatgaaaattcaacaatttcaatggagacatcatcattgtgcaggtcatgaaggatatatccggttctggcgtctgtttccctgactgtgtaaatacgcttcaggtgaatataggtactccatgcctcatcccggtcctcctccattaagtctctggcaacgccctcatcgatggaatggaaatcacaattttcctcacaccagtccacgcactcctgccaggcatcccaggctttcttcttccggcgttcattttcttcatcggccgagtcagagtctccatccacataatgaatgactggatctgggtgtcccccacaataagtcttctcatatttataaagctttttatccgaatgcgaaaaatgtccgttggtatctgtactaagccccatatcgcacacagttaaatcttcaaatttcccttctgatgtgggcaccattttcataaactggtctttttccagatttgtcccgtcaagctgcgaaaactcaaacttttctaatacttcaaaggtggagttttccaaagttttccctgtctcggaacactgcttttccagttcaatgacataatcccgcttaaaggtctcctcatgaaggtactgggtatatggaatttcatagtctccttccccgcggtgtgttgtactttttccaaaagacagccaaacctcccacgattcctgtttccctgccattgtaatcatggcctgtttcccatctactgcactgctctcgttccaaccatccggataccagattttaaagctatttggcttaacccagtattgagcccccagggagccatcctgaaaatgtcccctcacaaggccaatatcgggattacctgtcgtacatgtaaatgtgagtctgccatgttccagagacacattccacccttctggcaaatcataaacaagcgtggactgcctccaatcatcaccgtcaaactccaatgtaatactataggtcccatccccgttttctttcattttatgtaccggcgcctggctttgaaatttagatgcaaagggtggaacggctccttcctccacagctccattaacctgtttaaaaaattgttccaatgctcctcttgtcaataccgcaagcataggatctttcaggttctcgattaggacttccatctgactacggaaatcatctaacccattccaatttcctgacataatggcccaggtagctgcctgccccaaaatataatgtccctggccgattttcccatttcccgaaatgcctccttcaaaattacctgatgatgagagggcgtaccataaaatttctgcatcctctcttgtcagcccaaggggcaggttgtcaccatccgtatcaaggtcatatgttacaatcgttcccggagtgcccgaacgcatggacttattcggttccaggcagtatccaggtgctgaatggccgccttctacattggtaatcccatatggccaaaggccaacccgattatgtttttttccataaaagggaaaacttgctccttcttttaaaagattctgggagccataataggcaaacgtacttcctctgttttctccctccgatgcatctgctgaaataataccaaatccaacattaaaaaaagactgaaccgcaagtaacaccgctaaaaacagcgagccaccacgcttcagtcttttgaaaaagctatcgtgtcgtatcatatttttcctcatttccaaaaaaccggcacagactaacattgctgtgccggtttgacttaggctatttaattcatatcaggattatacaactgcgctttgcagtttggacaagggtggcaaacctcccttaatccgaatacatttctgtaatcgcagaacggacatttgagttccactacatccagataaaaacacgcatccgttctcgttgaagatacatcaatgctttttgcctgaccatctatatatacggcattccacatgtgcacgtaatcctcccgaagcgcgcacttaagccctactacattagccaaaagtttataggccctggcaaacccaacacacttgccagtcccattcaccagaatgctgtagacctcatcatctgcctgtgtatattttccccggttgtaggtcgcacgtaatgtaatctcatcataaatcctggtcgccttttcataatcactggcgccatagtcaaaaccagtcagaaacctgcacacctcctcataaactacctggttcttttctgacagctccgatgcagggataattcccctgaccgcagccaatacccgtgtgtcattcacccacgcatagtccgtatcttcatcaaagatatatacctgccattctggatcgtaataataaggccggttatcatacggggttcggacatagccgccaagcgactgctgttcggtcacccaactgccgtctgctgccaccaggtatccgtctggtgtagtagtatttacagccataattccattctgattcagataatacgatgttccattctctgttatccattccgccctcgcataatttccatcatctttctggtattgacagccggttgaagtattcttccatgctcctgcatacgccgacatcgggtttagggtaactgccaggaatatgaatgccagcttccagcctgtactttttctcattataagcacctccttctatccatagcatacaaagtctctggaatctatgtcgagggcatttctgaattttttttaaggaattacctcaaaggcatcccttccagcgcccaataacttcataaaatggctacaaaagaaaaggcatgaaaatactctctacatgcctttccttccatatacaattttaccaactactctacccaagccccggacgcatctacccggtatccgtctggcgtctggcggttcataaataaagcacccttggttccgtctgatgtggggttaaaatagtaccacactccgtcaatcaggttccagccggtatacatacgtcctctggtcccgtctgaaacggcatggaggtaatagcggttcccgtctgtatctgtaaaccatccggtctgcatatatcctttctcatcaaaatggtaccactcacttgtcccattataagtaagcagctgccagcaggcagccggatagcttccatctttattctgataccaccagccggtactatcctgaatccaggttccagcactgtcaaagtttggactcatagcacttcctatgacagaacggctggaaccgccacccccaccggaggaacttccacccgatgaaccgcttgatggccgctgtgtctgatctgttgttttaaacgctacaacgactttgcactctgcggacttctgcccatccaaggtaagcacctgaatactggtttccattgttcccgccgccgtggatacataatacttgtctcttgcaagattatctgcatcgaccttctcaagggcttttatccatgctgcttccggcaaaactgtcaccagaccattacctgatacggataccactgcttcattcaccgagttccagcttacctccttattctccgcctcttctggcatcacgaaagcagtaagctgctgggcatccgtcacctgataggaaacagacgggttggcccggctgccggtcatcaccttctctatgctgaacttaagttcgcttttatctaaggctaccgatgctacatgtgctatggtctggtcatcggtacggaaggaaagattcactgcacataccgactgttttcctccatcttccgttgtaaccgtcacataattggaacgggtaccagacgcttccttttttgcgtaagggtgctctttatttctctcttcttctgccctgattaaatctaaaatccactttgcattctctttggcactcacaataccctctgaatcaatccggagcatatccgcatcacctacagaccatttcacatttttgttgtccgcatattccggagtaatcgtttcataaagacgctttgaaggtgtgacggaataacgttctgtaggatccaaacggtccccttctaatgtcctgacaatctcaaatgccagttcagactggtcgagcttaacatctgataccgggacaaccgtatcgtcagtaatcttgaaattcaccgtaacaaatgcactggaacgcttctgcccggcttctgtggttaccgtaacagacgcatagttggttccttctgttgttatctttttggacggatataattcctgattggtcacaccggcttgtatcagctcctgaatccactttgccgactggttgaccgatacctccccattttctgtaacatggatgacatcggtagatgagccatccgtatctttcacattccaaatgatgttcttgtttgccgccgtatccggtatcacggtagccgtcagtttctgcggatcagtaaccttccagcctatctgcggattccaacgggaaccgctgcgtatctgttctatctcaaacgtcagctccgtcttatccaggataacaccattagtcattgcccggtatttagcagatagggtaatgtttccttccggcatggtaaaggaggtttcagccccattggtatgtatgatttcctctttgtcaaaatcatcggttgtccagaacagggaatccggcaccaattcataatatacagggggctctgactccgtttcatttaaaggacttgtatacaccaggactttggctcccttcgctacggctcccgggtttgcccagttgatttcttttgcaaaattattctgggattccagcacagagagtgtaccatgatccacagccggaattgtaatcaaataccccctgaccggatctcccgtcttactgggagcatagtgatggatattctcttttccaatttccaaaactcccgtttccagttcctcataaaaataacggtttgtctgctttataaaacttcccatctggtaaagggaaaaatcccgctggttggaataatatgctccgatgtgatgttccagccgaatttgcggtgttaatttatttccaaagggatttaatgagtacttgtcctcactatccgtatagagataggcgaggtcatctcctaaatcaatggtcccaccttcaatatatcccacaaagagtcccgctgtctttaatgtcgttgaagtagatgctccaatggtccctgcaaaccggccattcttaagctggccgctctgcatccttcccaccagaccaccgatataatccgctgacgtgctgccaaccttaccttccacatatgtattatatatttccgtttcgtagatatttcctgcaattccgcctacatatccttctgagtaaagagcgctgtagctatctgtggtatcactggtgcagtcactcataaaggaggattgggcagagccgcagattcctccagcgtaagcatcatttacgccgtctgcatcggttccccccaagactccagctgtattggtacactccaaaatcacgctgtcatatgcttccccaacaatcccaccgatgacacctacgccacgcacctgtcctctggagctgcaattacttatggtgctgtcgttcgtctctccaaccagaagtgccgccttactgtgagcattcacctgtccgtccaccgtcagattttcaatcaccgctccatggacactgccgaacagcccggcataatcctgagtcgtatcactgattttcaggttatacacgcggtatccctgtccgttaaaattccccttaaatggtttcggttcgctgtccccggcttctgtaaaatatccaatcggcagccaggaggcagtatcgcttaaggatatgtcccgtgtcaaagcaaaatagtacccctcataaccgtccacttcctcattagcaacatgatacgccaggagttttaaatccttatccgagttaatctcgtaaggttcttcctcggttcccgctccatcaaaatggtcactcatttccataccgccccaaatattcaaggcacctttgtaaaacatggcattggaaggagtagcattggaaggagtagccggaatcagctcatctttatctgtaatgacttctgctgcccctgcctctggttccttggttttgatttcctccgttcctgcctcgttttcctcttcctccgcttttgcttctgttttgtcctctaaatctgaagttcctgcatcctggtcagtctgggtgatacctgcttgcgccatttccccttctgcgctgtctttttctttctcccgcctagcttctgacggactggccattggagctgtaccggcttcttctaccgcctcgttaacggcctcctttgcataaacggtagcgataccgtttggatatgatacagaaagaactggagttaaccccatcgctgcaatcaaggtccatgcagatagaactgcctgccccttcttcatctttttcttcatcttgttctcctttttctcagaaaattccctatgtgcaaatttttattcctgaactaccacaaacgccggacggataccgattttcttattggttacatcctccggtgccacccggccgtcataggtaacagcataacccttcgttccgtcgccggccgcaggtgtacgcagccaatagcccgtcgtgaaggttcctgcatttataaaattattctcttctgcaccaccaagcctccataagatatccggataccggagcgcttcttccaatgaaaggcagaatatctggtccgtgactttaattcccgggcggctgcgctttgtaaatctccgggctgaaatctggtaattattactttttcccgcataggtaaacgggcaggttgtaaccgtttccgcaagcttttccctatcctccaattcctggtttagccatgcccttaaatcagacgcttcccaggcattttccctcccgtcaaaagggctttcgtttccaccaataatggtgtcacagagaaacagcgctccattccggttacttccggcatcacagtaatctggatcaatacagcggaaggtatatgatttcccggcaattgaccgttccatcgtatccccggtataccagattctgccctgtgtattatctggttctcccttctgtatgacaaaggccgggcggaccccggcttctgttaatgatacccggctggaagcaatgtgtccgttgtattgcaccatataggcctggtttgtcgtgttttctctaggcgacctggtccagtagtagcgcattcctctttgcggtgtccagatttttctggtaatcgctttgtaggcagggttttttacttcatcaacagacaggcagaaaacccggtctgatatggaatccccagtctctgaaagttttacggggagcaggtcccctgatactgacaaggtatcagcaaactgctggttaagccatgtcctgacatccgagtaggtataatcgttattggaagccgcataacggacacacagggagtagggaatgacctcatccgacacaaacagatatccaccccggtaatccgtatccagacaggtgaatcccaatgtgctgtatccatcaccgaggccagtctcaacctccagtgtatctcctgtctcaaacctcccctcctcacctctgactgtctccgcatgggctataaagccaaatagatagctgatagcagaacaagtggcaaccaaaacaaacaaggcatgccgctttttcatcctgattcgccaattcattcctgctcctccaccgtcactgataatgcaacacttcgtttcctgtcatcctcccctggctcaaagttcactttctgcccctccttcagccgtttaaaaccatctccctggatttcggaataatggacaaaataatcaatgttgtcctcatctgtaataaatccaaaccccttccgtacatcaaaccatttcacgattcctttcagcatattaaaactcctttcatatttgtgcaaataaaaaagacagcatctggtactgtctcaggtacaaaattcctattttcttttaataattcttgtgataatcccctctgccacttcccgctcatcgttaattctggttaccaaaaagccaacctcatctccctgccccggaaggctggctgtattacaggaatgtgccaccgcattgaccctgcagtccagttggataaaataggtgcccttatatacatctgttatttttcctacatattttccctggcggcgcaggcgcattaaattttccttgttgacattggtctttgcctctttggcacttacctctaccttcagattctcaatcgaatctccggatatcttcttcatcatcacgctaacaacatccccgatggcgaatttttcattggcatctgccatccattcccaggacatatccctcgcttttaaggagcattccacgccaaagacctctaaccggaccgctttctgtgccacggcaataactcgcgcttccacaacacggccaggcacaatcatagtgggcccctcctgttgtcccaggtaaaactgctggcgtttacgaagcatcgcctcttttctggatgcaaccacgcttcttgacttttcctccatctcccggattataaaatccagttctgcgcccagcatgttgttagcaagacgggtctgacggtttaacgtattggaattttctcttccgtctccctccaagttaatcatcatttcttccatggggattaatacacggtaatctttatagtagacgactgctactacccatccgccatccaggcgctcgataccacttaatcctccagacaggattttctttgtgcggtaggcattcaccatttcatgccaggttatatccccgctctcctgccttgccgctgctccggaagcatctacggtaaggattcccatttgatggacatgtccacgcttttccctctcctgcacctcctctgccagacgaccttcactgtcttccctcatgcatataccacctttcttgtttttttgagtcagaaaaagcagccggcgaaccagctgctttctctatccagattttcaaatccgatgataccattataaaagattgaaaatcgcaagtcaattcatgtcaggacgcaaatcagtctctttttggttctttttcggtgatatcaatcagaaacttatcaatgcagtttagaaaggtcttggacagttcctgatataaatcctcctatccctccaacatcagacggacaatatttacttttcttgtaatcatccgcatttatatgcagcattctatccccccttcctccttgttatcattcccagttactccctttattcatatgttctgctgaatacggctccaactcgcatacaactcgtgctatttatacttactattccagaaacatttcttagtatagtagtgatagtgacacccaaagagtggaatgtaagtcggcggtatttcacgccgacttttttcttttctcacgtttcggcagttcaatggcttcgccagtttccccatgataggcttctttcggcagttctacgcgttcaaaggctggccctccaaggaaacggaaggccagcctttgacgtttactatttgatgaaattattgctggagcttaattgtgtccacgattgccattctgctgatctgccggatagggcgtctgattgcaaccgccgcagacgcaaggcagaggaacacgatcaaaagaagtgaacccacagggatttgccatgcagttccccacttatctgcaatcaaaaaccggaacatcaacttgttgagcggtagccccaaaacacagccaacaacacagccaaagatggcataggtaaaggcttccgccgcaatcatcttataaagctgatttgcccccattccgatagaacgcataatgccgtactgctttgttctggacgctacactggcgttcatgctgttaaaaatgttaaacactgtgataagtgcaataatgatgaggaagccataaataaataccgcgcctgtatagtaagagctttgggactcggaattggtaattctcttgtctgaaacagtgctgtcggatgggatcatgctccgtattgtggaaacagtatcatccccaccagcagaggaaaactgaacatcaatcgttgtatagcccaaatcgccaaccaaagcggcaaatgtctgctccgagcaaatcatatatccgctgctgcctgcgctgttgactgtgctggccgtagctgttgacagtattccagcaatcgttacctgcttatcgccggaagatgtatgaaggactatggtatctccaacattccagtttacgccatcctgataagtaaccagaacacgatctgtattttccatagcaggcgcgatactgccctcattcaattcttcttttgcccacccgaattggttatcatcataggaaatgagtgtgacggttccttctcccatatcagaggaaacagaaagaccctccatttccatacggccaaaaactttgtcaacaccttccgtttcgctaatctgtttcaccagcgacttatccagaggcgtatttcccattgtaatagatacgtccgctgccgatggagagagcgcaggcataccctggttgagaaaaactaccatgacctgaaacgacaggaacatcataatgctgatagcaaatgaacaagtcatgaggaatacattctttttgccggatagtgcatggaaaattcccatgctggtttcaatgtggaacaactttgtatttgcggccctcttgttctgtgtaagctgcgtactgccgctgattgcagttaccggcgatactttagaagccttttttgccggagacagggatgccagcagtacaatcagaaaaccaatcaccgcaccagcaatcagaccgcttacactgaactgaaaaagcggaatttctgaaaagcgttccccgctgatggatttcagcaagagacaggcacaccatgtaataatctgtccggcaaccagcccaatcggtacgcctttcatactttggcgcagcccttgaagaatgacgaagtgctttacctgtgctttggatgcccccagacaccgcaaaaggccgtagaattgaacccgttccagaacatttgtgttaaagctggcagcaatcattactgcaccggcaatcagtaccaaaaggacaagaaagcctgcaacgatgtatagggactgcattgtactgttctcactttgccccatcaatccgaggagcgccgtgttttcgctcacctgactgtctgaaaggccatattgcgtttttatttcctttatggctgcctgaatgtttacgccatctttaaactgaacgcgaaaagtagttccatctttggcattttcgtctgcaatttggcgaaaaccgtcctcggtcaataccatgccatatacatccgctttcagcaaacttcccatatcggcaaggacgccggtaatgcggtagtcccggctggagccatccggcactataacggtcacggtgtcgccaactgcaaggcccaactgttccaaagccgattggttcaataatgcttcatcgggccgggtagggtatgaaccgctttccatatccatttctgtcaaagtggaaaaggtatcctcattcgcacctgcgaagctgaccgttttagatccgatagagccggtacttccctgataggcccatccgcagagggcaacatctatccgcgcttttacaagttccgccgtctgttcatcaatgtcggtcaaactaatatggtattccccattcgtcttgataaaataatttttctgtgcgcgcagcgccatgtctgccatgctgaaaatagcagttatcagcaacaccgaaaggacaatacagagaaccgaaattcgattgttcttgcggtgtaccttttcatattgcggcaccaatccaagatagcttttcaacgcgatgacacccccaaatccttcagcacgccatcggtcatacggaacacacgatctgctgcgctggcgtgatttttgttgtgggtaatcatcaaaatggtctgttgatacctgtctgacatggtttgcagtaaagccaaaacttcctgactgtttttactgtccagatttccggtcggttcatctgccataatcagggcggggcgtgtaaccaatgcccggccaatcgccacacgctgctgctggccgccggaaagctggctgggaaggtgtttccggcgttcgctcaatccaagcacctgcaacaattcattgacgaacttttgatttggctttttatagtcaagcagcagcggaaatgtaatgttctgctccacattcagctccgggatcagattgaatgactgaaaaataaatccgatgtgttgccgccggaacacagttaatttcttctccggcatggaaaaaatatcctgcccatcaatccacaccctgccggaagtgacgctgtccagagcgccgatcacattcagcagggtacttttgccggaacccgactcgccaatgatagcaataaactcacctttacggacagaaaatgatacatggttcaaagcgtgaacttctgtttcgcctgtgccataggttttgcacaggtcttgtacttcaagaatattcatattcaaaacctccttacaggcacatcataccccctatgacttacttccaagtgacatctatcttactcatctgtaaggttgaaaaaattcaatgtaaacgtggttcctgcgcccaaactactggttacagaaatggttccgccgtgagcttctacaatagatttagtcagcggcaaccccaaaccaatgccatgaacatccgatgaaaaacgactgcggtaaaaccgtttgaaaatgttatacagatcttccgggtgtattccttttccatcatcggtaatttcaatctgtgtcattaaaggggactggctccattttactccgatatggccgccgttctctgtatgctccaaggcgttttttataatattgccaatggcttccgatacccatagggcatcgcatgataaaacaacatcttctttaccggaaagcgtaactgttttatgctcccgttccgcccaagtttcaaagcgttccaaaacatcctgcatgagaacggaaagattttccggggtcttttccatctggataattcctgcgtccagccgtgccagtttcagtaaggtgtaaatcacatcttccatccgcttgatctctctttgagatttttcggtgaaactgctcacggttgcggcatcatctttatggctctctataatctcatggtacattttcagggcagacagcggtgttttaatctgatgtgatacatccgaaataatgtcctgcaaaaattctttggtctgccgctggttctcggcatgagcagagaggatagtcgccatttcattgatggcatgaaaaaggctgtaccagtcaccagcctgtgaacattcgatgcgggatgtggtattgccatccagaaattggcggatggtattttcggcgttactgaaagccttgtgctggcggcgaagatagagaaacagcgataagtagattgccccaaacaggaaaatcaacagcagaaatacagaaaacattgtctgatttcggtatatctggacagcaggcagaaaacgcatggaagtcgtttcatcatatccaatagaagccaaagcctccctgccgcgttctatgtcattcgcgtctggctgcgaagtaaaagtggagattgacagctcgttttcattgtttaacaaatggcctgcaacaccataatcatggagcaataattcctgctgaaaattttttgccagaagtgtggcaattccgccagccagaagaaaggaaacgaggcagatagcagtaatagcgattaacagtgtctttgtttctttccctaatttgcccataaatccgtcctcactcaacaacccacttatatccaattccccgttcggtcagcagatatttgggcgtatttggcgtatcttcaattttgtttcgtaaccgccggatataaacggataaagtattatcatctacaaaattcccattgccatcccacatccgatccaaaatcatttcccgtggcatgaggtgattagggttttgcatgaacaggcacagaagtttgtattctaccagaggcagatcaactggctcgccgtttttccagacaagcctttcggcggtatttatgcgaataccgtttgcttctaaagtagtatctgctttggaaaacttcaacgaacgacgtagaatagctttaattctggacagtagttcattcagcttgaacggctttgtaatataatcatcagcccccatatcaaggccccggacaatgctgatctcctgatcagatgctgtcagaaatataatcgggatagttgagttaatacgcacctctttgcaaatatcgaaaccggttccatctggtagtgtaacatccagcagtaataaatcgtaagcattttgtttgaatagctctaatgccttttttatagtccgggcattatccacggtatatccgctggtttccaaagtatattgtaagccatcaatcagacttaaatcatcttcaacataaagtatcctctgcattttttagcttcctcccttgttttgtcctaccgtctatcggcttttccgcgtttttcgggattaaccatattgttcccatttttatggctccgagaatacggccagaggaacaataataatttatccagcggggcgttacgccccatattttacttgcttctttcagcgtcatatagtccatatctgcacctccaaactcattatagttcgttttctcgaataatacaagacacatggacagctttttagtagctacgcagagtagccgctaaaaagctacgcataaatcattttgaatacctcacattcacagtacaatactatatgtgaggtgacggagcgtggctaagaaaaagcaacagaccgtttattcctttggcacctcgctccggcgtgcaagagaaaagcgggaatatacccgtgaaccttgtccagcacatccccgccagaggtcagccggtaggcttcccccagcttggtcgcaagcacccccataaccacatagggcaaactggctttcgcggctttggccgcattgattttggggagttttatcatcgcgccacctcctgttgcttattcctggacagggattgcgccatcttcttaacgacctcctgaagctgcacaagctggcggcgaatggagggcttagcctgggcctgacgcttgactaccttgccggagtattccgcaaaggcagcagtcagcgcgtccgcgtcctttgacttgaagaacaccagatagcggggcggctggcttgttgtgtcctttttcagcgcaaaatccacgccatatttccgggccacacgttcaaaggacttgatatttccgtcggtcacttcgatattggaaacacccgcgccctgccggacaaggtgcttcacactctgtttgccccgttagattttcgggtttttctggcttttctccatttcagccagggctttggttatggcctttttcagcagatcagcggtcagctttcccgctttgacgctgattgccacggcctttcgttccatttcttcctgcattgggccattcctccttttcggcagggtggaagtggaaaaggggaacgactaaggtggcaccaccagccgacgcaacaggaagcgcatcagccagtggagattatcaacagccctcctcatggccttggctcctgattttcagaataccgtccaatgtggtggccgtaatgccgaggcgctgcgctacggcaatatcattttttacggcttcgtccacttcctcgccgcagacaatcaggacatggctgcgacgcagcagttcccgcgccatatcaatcccgtccttgtgttcggcgtggactgtatcattcagaaaatgcggcagatacaggattgggcaaatcggggtaaaaccggccagataaaccttacggcagtaaaccgctgcctggtcggtgtcggtaaattcctggccgctccaggcggcagaaatgtatgcaaaagggtttttcacggggttgctcctttcttcggcagtatgccgggtggcaaatgcccgtccccgtgttaagaataaaatgaacgcgcaccgtgcgcgttcttgacacagtgccgttcatttgcagtttggtaatcaaggcgggccggataagaccggctcgccgcccttatttgagtatgaaaaaacagttacccgctgccgtataggtcgtgattgaccagggcagtaaagtaactgcttatggtggtaggcgcattgtaaagcgaggtcaggaggtatgcgcggatattccgaacctttgtcgtgttctcccgcaagctgcttatcacatactcgatatgttccgagtccagcttaagtaaccggcttcttacaacctcctttgggaagtcctcgcccccaatgcgtatcatttttcgagtgctgcataccgtgtccaccaggatttccagaatttcatccagtatgtccctgtcatagccaagtttctggcaaaggtgatcatactcgatattctctttcaaaatctcccgataggcccgcatcgtatccatcgtatcagccgccgtaggcggtctatcttccgggggccttgcctccggatagatagatggatcagtatcactcaaatcagtcttattcttatcagtattgattgtgtccgattttcggaagtcttgacttcctctttccgagtgaagttcttgacatagattttagtgggtcggccctggccctgcttcctgcgctcaatcaggcccaccttatccagttcggtaaagagtgccaccgccttgttgtggccgcagcacatcgcgtccatcgcttcctccagggtaaagtagatgaatacccggttttgttcgtccaaccagccgttgcgtatggacagccccatacggtctaacatcaggccgtacaggatttttgcgtctgctgtcattcgccggaagccggggtcagtaaacaaaaccttgggaatccgataaaaggtgtattgctctgcctcggctccatagaagtaatccaatgcacccggctcggccatgttctcgcctcctttgtccttgaatttacaaaacaaaaggtgctgcccgaacgcaacaccttttgaaatcttttacgccagaaacggcgtagttatgcgtttttttgatgataaaccctacaatttagcggcggcctgtctgtgtgtatttattgattgatgaagggtatccctatggctagtttgcttttcttaattcattgttttatttatcatatgactttacattcttttcactttttatgatatacttcattaacagaaacatgtgaaacaaaccattttcatattcttaaatttcagtcaatattaacccggaggatattaatatgaaatcaatttttgagtctgcaaaacagctaaagccagaactaatatcaatcagaagaacattacatcaatatcctgaaataggttgcatcttaccacgaacccaatcatttgtttttagtaaattggaagagtatggatattgtcctcagaaaatatgcgaaagtgctgttattgccactatatctggtaagcagcccggcaaaacaatccttcttcgcgctgatatggatgctcttccgattaaagaagctgctcccgttccatttgcctctgaaaatggctatatgcatgcatgtggacacgatatgcacacaaccatgcttctgggtgcagctaaattattaaaacattaccagcaggatctggttggaaccgtaaaactggtatttcaacctgacgaagagggattcaccggagcaaaggcaatgcttaaggccggtgttttggaaaatccccatgtagatgcaggcattgctttccatgttgtttcaggcattccatccggaacgatcatgtgtggttcaggtacctgcatggctgggtgtattttatttcaaattcatataaaaggtaccggctgccatggtgcaatgccggaagcaggtgttgaccccatcaatattgcggcccatgtttatctgtctctccaggaaatcattgcaagagaaattgctcccacccaacctgccgcccttaccattggcaggtttactgccggcgaagcgccaaatatcatccccgaagatgtgattctcgagggaagcattcgtacaatggattacaagatatccaaatatatctttgacagaattgaagaaatctccattcagacagcttctctctttcgcggacaggcttgtgtgaaagaaatcgcttctgcaccaccgctgcaaaatgacagtgatatggtcaaggagcttaccagctacatgaaagaatgctatgagcctcataaaatagtattgtttgaacaaggcggcatggggtcagaggatttcgcctcttatacttatgagaggccatgctgctatatgttaataggcgccggaaccccagatgaaaatccgctattcggcaaaccgatgcataatgaccacgttgtctttaatgaggagattctttccctaggcagtgcactttacgcatcaaatgccataaactggctgcgaaaccacagccaataactttttctttgtacgctgaatatattaataaaaaagggtattcatatgcgtacaaaacgatataccgttgtcattgcgggacttatgccggaaatcgtcactcagaacattctggttaagatttggggaaaagctgccaaaaaagtatacgcgagtacaggcatatatgtaaacgcatggttaagcgaatcctatttcctttgtggggataaacggggaccagatctagatgggttgaccgctaactttataattatatggaatccagtcgaagtggaaagttatgaaaaattccatgaagcgttcacacaggttgtaaacggtgtaagggacatattgggcaatccatatgtgtggattacgatagatgacatagagttctattattttgtaaaatgctgaaagctaggagccgcctttgggcggctttcctattccccaaagcgctgactcattaagttgtctgccgattcagacaggcgtcctgtttgtgttgcacgtaaaataagcgtgtaaagctgggttttagaggcacaaagataattcttcttagtgtttgtctagtctttatggtcctgactccccctattgctattaagctgcttatgggacaagtatcagatacccttgaaataaatgtagcagcatacataaagataattgctattaaaggaaaagggaatacccctgcctctgcatgctgtattcccttactctctgtctccttaaagactcatagttgctggtcctcctgtcgttaactgcggattaagaaggaaattcagtcttatttttgctcgttttcagtcccctcaatagaaaactgttcaatacaggatacaaaggtcttagaaagttcctgatataagtcctctgaaaagattcctttgattctggacctgcttaacaccatgggacggtacatcaaaaacagttcctctcttgcccccttgtctccctgcttagccttcattaacagttctttaaaattcattccgtattttccatcctttcctcatttttttcttcgcatagttaaaaacagagccggcctttttatagtccatgcccaaatgcctgccgatctcttgatatgtcagctgtctaaaaaccttcataaacactacaagaatttccatatctgtcagagcatcaagcgccgtttctcctgactcaccaatctggctttccatatactgacgaacttcatccggtatcagtggaatctgctccgtttcttcccataaaaatggcttactgtccgttatatcacacaacggttctggaagcatcttctctaacgggctttcatgattgcttatttttatttcacggcatatgtaatctctcttggcacgttttaaagctgctaatacataccccgtaaaacggtatctgatattatctttctttttcactttcatagtccctccgaatgtagaattatctcttttcagaaagactatggtgggccacgaacctttgtcctatatattcccctgctcatgagggtgtatactgttattttgaaaacaaaagaggaacagctttgtactgttccccttaaaaagaattgttgatattggctttttgctatatcgcattctttaagtctttggctctttgctactcttcctttctctaagttatatacctttatatttagggataatagtttatgtttaatttccggttctatattaacttaataaaatagtgtccatcatccataaagaggtaatgtacttgaagagtccagaccatcagctaatttattggtttttgatacactgcctttactacaacacccgtaagaaataccgacaattcttaattaatagcataggcaaagcctacaaatcaatccatagagggatagcagttggttttgtctctcaaagcctttcataacgcctccaaaagcagattaccagcccgctctttaataagccaattttagataatcatcataacttttgaactgcacacacggtctcataattcgctcaggcttaataaattatcctaatagtcatctgctcacatttttttagtcagtatactataggattttcaacgaggctctatctgttcaaattctcaaaggaaatgaaactcaaaggaactccagtactctattataattctcctcctccctaaggacagaatagtttccacacaacaaagctcctgactaccagcagctagaatcttatcctatctaaagttacattagccatgactgataggatgttcgcggctcttgcaatgggtaaaccgcctccacattaaagtccgcattttccgagaattgaatagaacattgttagttccaccactttctggactggcttctgattttttgcttcgagaagatgatacccacaagctaaccttctcctacatcagggtacccaggtggacacatagcttacagtaactttaacagttctgcatgaataaatccatttgttcccaccacactgctcccctttttcggttcaagcggttctcctgtaaaatcagttaccttgcctcctgcttcctgaatcataagcatgccggctgcatagtcccagggatttaggtatatctcgaaatagcctccctgcctgccacaggcggtatatgccagttccagagcggcagagccaattctgcggacatcctggcactgaccgaacaccctgcggaaccgggcaaaattttcatcggccacttctctttttgctgttcccagcccaatcattgtgtcagatagtttttttgcatttgatacatgtatgggctgcccatttagaaagctaccctttcccttaattgcagaaaacacttcatcgcggaagggatcatatataattcccataataatatccccctggcggcaaagggctaaagatacaacgctgtgctgatagtcgtgcataaggtttgtcgtcccgtcaacagggtctaaaatccaaaagctatccgcttttatttcctgcaatccggtttcttctccaaggaattgaatatccggcgcaagggcaaacagttccttttttaagaaattctgtacggcaatatctacctgcgttacataatctgcaagacctttctcttttacatgagcggccatttcacggtttttaattagcccttgcgtttttgttactaaactgataattttctgaatatccatatgcgtttcctccataggcatcaaatacctggttgcaaaatagagttttgcaaaccatgcttcttaatttaaagggttaagaaaataaggtctaaaagaacacgacaaacatgaattgacaaagcttaacattataccttgagaaccagccgaactaggccaataattagcaaatgaatcggataaaaggcatagaataaccaacgtggaaccttcaggtttgtatgggtacaggggaagataaacaaagcggcaaaggccattgcaaaagtccaatcaaatgtaagaccacccaaggtgagattccgaaaatcaccggggcgggcgaaaagcgctggcggaactgtaaacagcagatagaacatggcccctactaccggattgttgcggcagagatagaacaccagcatcaaaaaaattccgttgctggagtagtcgaagttccaccatgaaatcacaaaaaaggtcagtgcgaacagccaccatttgcgttctttccatccatacatcgccaaaaggcttagaaacaaagtaaagaagatattccagttagtaaactgcgaccaaaagtcatacggatgaaaggcaaagatataacagggttgagaaatcagtgcaaatattcccaaacggaataaatatttcttgatatcatgagtatatagcaggcccactgtcatgcaataacagaaaatcggaaacgccagccgtccgatccaacgcagcacccttacctccgggaaaaaaacgctgccgatgtggtcgatgagcattgaaacaatggcgattagtttgagaaaatcagtatccagattcgtttgcagtcgggccttattatctgaaaacgtgggtggggtaagcaatagctccttcacccgctttaaattttgtgttgttttcatatggtttctgtccttttgttttcatattcattgcagataaatcaattcaaattttccagttcaacaaactggaagttattattctgacaaattactttctccactccactacatcatcaatcttcttgcgtggcctttctttaggaaattcatttggataaccaaatgcaatagctgcaataagttgtccgtcactattcaaccacttacacagttctggatatgcaaaataaatatcacatatccaaagactacctattcccttctcagtcgcggcgagaagcatattttgtatagcagcacttatagattgaatattacagatttcataaacacgttcttctgttgttaattcttccataatacttttccccagtgaattaacaacaaagactatggttggtgcttctgccataatatcaatagtgtattttgcagaagctatgtgttgtctgctttgcggtaacaatgcgctatcgttttcttctctcccgattcccaacctgaaaacatttatcatgttttccttagcatttccttgtatcacaacgaacttccatggttgtctatttttagaagaaggggcttttattccactttggataatatctataatatctttttgagctataggtttatctatgaattaccgtgtgcttcgtctgttataaattgaagaaatcatttttacttttgtcctttcaattatcgacttgtttattcctccaccacatattagttattcagaagttttgtcgcattctcaatagaagcatccattttcatagagacttcctccatcgtcaaggcggaatcaagaaaacgcttgaccaccactttcatattttctccaacctctatgagatgcccagccagatctctgttgtgttactcaccgacaaacctgaagttgtcttagagctttaatacggcaatctgttcttctccatctttttctccagtttctataaatccaaaagaggcatacaacgatttggcaaccgtgttctctggctcatatgacagccaacaggaatcggctttaccacagggaaatgttctgataaatcttaacgcaagttctacagcctttttcccatatcccctgttttgatagttcttatctatcatcaatctccacaggttataatttccttctgctatagcaggtgcatccttccaataatcatctttgccataaccaatcatcacaaagccgaccggatgtttatcttcataaattccaaacggaaaagcatacccgttggatgtaatagtggtatacgcttcaataatgctgatatcattgccagcaacaaaagatttctgactatctgagacttttaactttagaatatcccagacattttcgccatttatcttttccaaatgaatcattctattcacctctgaaaatcccgatttgataaattgttataagccaacttttttgaaaaatactcattatctaatttaaggtagcgtatttaataaaatttctttgctatgtgcgtggttcctatccatcggctgtcatctgaattgtgagccaaacctgctaatttgacttttaatgcaacaggatttactttaatcccttttatatagtcaaaatatttaacagactcatcatgcgtcagaatcgcaaccgcttcgactatttcataggaaattctggattcaacttttcaacggaaaaatgctcattgatgcaataccaatttatataggttgtttacttgaaataagaccggatcttaaccttgccataaaactgcattccaaaatttcttaacatccatctctgcgctcctttcaaactgattcgtcatttcttacttttcgattgaaataaacggaggaaaggtatcggagctatcgttacgccgcatagtttttgagtccacatcaaaacacttgccgttgtattcatagtgtagcttattagctttaacataaaaacgatgttccgattgaaatgcaacggacttaaaatgtccttcttgtatcggctgatcccgatataagacctgatcttccgataacttcagcacatcattttcaagatgcatatcataaattccacttacgatagcctctgctgccatatttttccctgaagctgaaatgaaacgaaaacagccagtcaaactattggtgctttttcgctccgctagttcaaatcggaacagggatacaccactgaaattcgctctgagaatattttagattagagaaagatatttgatctgagtaaacgccctgtaacgcaccattttcaagttcgtaaactaattcctttgtaaacagcgttttccatccacattcgcttcaatgaagttgatgatttctttcattagcacccgacttcctttcaatttaaaatacacccttttacgccaagaacgcataaaaacaacttacaattttcaagccacacaacttcttattttctttcccgctcagctacacggcagcttttctaaatccccgccagcctctatgagatgcccctccagacctctgttgtgttacacttaccgacaaacctgaagttatcgcattacacaaagactatcacagaatacagttttaattccatcaacacgacatccttcacaattgatatgttcaggcaaaatgggagcattatttaactcggcccaccgctttgcagttttctcacgcaacacctaatcgtcattgattgttacaagatatgcctcgcattttccacaatccagcccacagtatgcaatcattacccataatactgattgaactttgagtaaagttctgtttcatgtcggttttgtgctgcatactcaatcatagtctcattctgtatgattcccgcgcagaaaaccaataactccaatttcccattcaaattcttcagcatatcattttttattttgcatccccgtttttgtacatattgaaaaacagttctctaaattctttctccgaaagacttaactctgtttcgttataataaggggtaccatctttaattccgaattcaagagtagtaggtccgtctaagttgtaagctttatgtgcgtagtcaatcgcttttgcttgtcgaacataatctactaaagcctttgctgcctttctggatttttcgtccgatataccgccaactgcaagacctgagcctgcacagtaaatatctaagtaaacttcttccgcttcttccgatgtcgccagaatacagtatgaaaaaagattctccagatttttcgtttcataaatcggttgaccaaatagcgctttgattttaccgcatatgagtgaaaactgatttccataatctgaaaagtcttcaatgaaattatatagtttactgctatctgttaatatttccatgcttttcactgattgaaatgtatatggcattttatcctcctctgtttttgagcatatttgaaaattttattttttctcgttattcagaagttttgtcaaatcctcaatagatacgtccattttcgtagatacttcttccatagtcattccagaagcaaggaaccgctttactaccatctgcatatcctctccaacctctatgagatgcccatcccgattgttgttgtgctactcacgacaacctaaagaatttataattcgatattgtatgtcagttcctcatattgattttccggtaatatttttttcaaagtattcatagcaaagttaaattggttttcatattgagaaaaactgtctgttttttgaatcttaaatccttgtcgaacatataaaatgattgccttataactccatggttgagtgtggatatatactggaaactcatcgtttacaacgaaaatctgcataaccttctggcaaagagcttttccaatacctttaccctgatattgaggggaaacaacaagccaatgcagggaagcaaccaatgtatcgtttcttaattctttccacgcaatgcaagaaccaacaatttcatttttttcattgactacaaatacacatctttctgtaatatcaagagccttttttgaacaataagttgaaatgaaatactgctctgcttcatcaactgaatcaaagtctccaatttcatattcaagttgtgcccactttcgctcatctccatcttgatacatacggaattcatatccattatgcaaaactggtgtagtggttaaataacgatcacaccgaagaatagcgttataaaatggtatcgtcctgtctaacatttaattttactctcctcaaaatttcaatttatttatatgcccgctgcacattagctatttagaagttttgttaaatcctcaatggatacgtccatttttgcagagacttcttccatagtcattccagaagcaaggaaccgctttactaccatctgcatatcctctccaacctctatgagatgctcgtccagatcgtagaaccggattacacgctgtccccaactatgctcaatgacttctcccaaatattcgatgtccgagtatgctttcagcttattcaggaaaccgtcaaaatcctgttcctcaaagacgatttccgcgttgttggatttcttcaataccttttcttttggtatacttaccagccagtcaaaatcctgctgtaatgccaaaccgcaggtaaaagcgatattccttccgtaatcctgatagacctctaacccgaacaattcctcataaaactttcttgcggcgctgatgtccgctaccgatattactgtacatacatacttcatataaacgctcctcaatctatagctgttctttatttctgataaagccttttgtataactttataaccatactgcccaatctccatagtcaaatgtaccgctgccgtgatgtaatttaccatcttcccgtaactgcctaaacgcatttctcattctgattaaaatctccggctgaatatccaaactatgatgcgcaggaaaaacctttttgaccggaagctccgaaatcttttcaagagaagcaaggtatgcgtccgggtctgttgacggataataggcaaataaagtgtccttgtaaaccaggtctccggtaaacagataacctctgtctgattcccagaaacacatatgccccggagcatggcccggggtatgcaatacctgtatattccgtccgcctaattcaatgttctctccatcctccagtacctttgttggcgtcccctggaaaaactcataagtgcctgtatcgtaaccgtctggtaaatcgcagcggtctgccaccagccctctgattgtttctattgtcagaggaaactcaccgttcagccagctcaattcttccgcatgggcataaaagtccggaaaatacttatggccgccaatatgatcccaatgaatatgggtggcaacggccgtaacaggcttatttgtcagcttcattacttcatcataaatattgcagattcccagacccgtatcaatcaataagctgcggctggagccatttaacagatagcaatgcgtctcctcccaatgtcggtattcgctgataatatatgtaccttcatcaatctgatcaatcgtgaaccatttatccatttgcaagcatacctccataattaatatctgattccctttgcagaacatcacttatttttctgccaaagggcgtttatactttcactcatctaaattattgactctttttccgtctcttcctctacagggcgccacgcctctccaaattttatatccctgaatagcgcggcaagacctgtaatctgcttgagacgcaaaatttcatctctatccattcccaaatgctttgagatccaggcgtctgatcgcccaaactcatgaagttcctttacgatgttgatcatcagatccacatcgattgcggttttgtttttccatggctcttaatctccttcattataattttacggttttattataactatttacctgacatattggcaacagtcgtattggtaaggtatgcaaataggttggtacattttgatactgacagaactagtttgccatggtataattcaggcagagagaaggctagttatgaaaccacaagaaataaaatttacttttgtatataacgaaattaagcagtgtagaaagcattttacaggtatatcagacttttgctctaatattgccttcacttatgttttttctttgcagggaccttgcggcaaaatcgtctgaaactgcttgttggggcccgccccaaacccggtgcttcggggcctcatgctccgcaaggaattttttgctgtacttggcggccttgtacgtctcgaatacgggccgggtcttggcgtatttgacaatggcggctttcaactccgcgttggtgctcatggccgcctcggtggtctttagctgttccgtcagcttgtggaaatgttctgttgcctcggtggccttttgttccaactgtccgtattccatcagtccgttgttgcaaataggcaagggcggcggccatctgtttcaaattgaaaattttggcccaccgctcatatcccggccccttgcccgcctttaacttagcctgaatatcaacaaccagattgatcttgcgggcgggggctcccgtgcgctttcctgtgccagaaatggccgccttgatgtcctccggcccgtaaccgtctccgagggtggaggcccacagacgggtaaagcgttcctgcccggacgtgcggaaactcacagccccgccgcgcccatgcttgacctcatagcccgccgcctccatgagagagaggaacgcggcaaaatcgccggggctctgtgcgagggccgcgtctatggcaatttttaatctgtcctgaaaattgagcggcctattgcccgcaaaccattccccgtagtgcttaaactttgtcttactgtgtggctttgggtcggccacaatggagagtccgttttccagacaaaggcggtcactcgcacgccggatagcaaaggacgagccccaaaaattgcggaatttccgggtacagtcaagggaggttgagttgtagtaaatgtggcagtggatatgggatttatcaacatgggtcgccacaaagaaagcgtgacagccttttgtccagtgcatagcaagttcatagccgatacggtttgcgtcctccggtgtaatctcgccggggtggaacgattggcggatttgataggtaatgatgtcgctgtctgctttttgctcccgcccggtaatcgctttatacgttgccttggcaagtaaaaattccgcgtcggcggtcagggggtcacacttgtaagcggaaatgagttcgccgccattggtcttgtccgggttctccccatagtcgaaacggtctttcaagaattgggcgatagtctggcccttgctggtgtgcataggtatcaatcgtgtggtagccgtggcggcctcctttccacgcaaaaggcggcctttgaaagaccgccttttccaatcattttcagttgtggtacttcgagccaacttggctcgaagctaggtagtttagtacaccttataccaataaggcgcactacgccaaatgctcataatatgaatgttcattaaaaatctctgaccgaatcaaaccaatcttgccaactttctggtgggatatccaaagatgatgcagttaccaatttttctacggcgctgccaatgtcctctctttcgtcagtttcaataccatctaatttattaaatacattcaaaaatgaaacaatggaatcatggacttctttctcagtttttgcattttttatttcctttagagaagtcttatatgcttttattgcagtttttgcaagctttcctttccaagctgaaaatggaagttcatattcagtagtaaaccatcccttttttcttaattgggatacactcgaatattgcaaatctttttccgccatcaaagcttgaagctctgcctttaacctttttccttctattttctctatattccagcctataaaccccttcaaattattccatgtttttaaatgaggaaacccggttaagtctggtgaaaatcttattccaatagtttctaaaaaacgaagctgggacaatgcttctaggttaataagcctgcctgttaaatttaagtttttaatattttgaaactgtaacaagcttgcacaatcaaaagctgaacccacaacactactgttaatttctacaagtgttgcttttgataatttttcaaagtgcggtatggtatatgaacgtgtattatcctctaatggtgtgggggttaaataaagtcttggtgccttgtcacactcgcgtatttgaaaattctcaagcttcccactaaggaatagatcagaagtgttttcacctatattttttatacaaactctaacgttgtcagtatggatagaaagcctgcttatgtttgaattactcaggtctacacacacatcttctttgggaaaccagtgaaaatcttcaatatgacgtttgtttgaccactcaataaaacctgtatcattcccggaataatagaaaaatcttggccaatcgccatatgggtacaatttgttgtaccttgcaccaaggggggtgaaataaatattaaaactatcccatattatagccttatcaggttctaccataacatcgtattttccgtcagaaatccctcttgtgccaatggaaaaactaccttgccctgctggaatttttattttatgactattttttccagtaagagaaataaacacggttttgtctgttatcataaatcctcctgtgtgcaaaatacaaataatctgctgtacaccttctccgccaaaggcgaattaaatcttctaaatcaattatacaatggtttatgccaaccgtcaatgttcgggtcaactggcccgaagtctgcggatatgggaaaagaaggggcaacggcatatgaccgcgcccctccttttccttaccgttccacgattgccgcaagctgttccagcacatcggacaccgggctccagagctcccctttcctttaaattctttcttatattttacggaataggggatagctgcttgtcaaaatcatagtgttactttatgactgtaagattcagcttttaattctgcactttattaaactgtttcatcaacagttgtgttgaatagtaatagctgtccattgtttcatactttctatactcgcactccaacgctaccaaaagcattaaatacatatcataccacaaggctctcctctgctgattttctgttagatttctgattccatagcctttttgaaaataggtattatcagaatacgtgcggaatcccacttccatgaggggatcaccccaaaggcttctttcccaatctataatacctgttacttttccagactgaacaaaaatatttccgtcccaacaatcccaatgaaccagcttcggctccgtcacttcatcaaaaataatcttatctctgtcaaggcagcgccacatctggtcgattgatattttcaaatcaacgtttccttgtcgtgcgtcattcaccccggcctccaacatcttacgaaaaatcggataccattcttttccctgaaatgcagactgtccgggatatccaaacacagggcagggtatatcatttattcttttatttatttttcccgcttcaatatagatgtgattaatctgtgctaacggaaggctgtcttttacagcattaaggctttttccctctaatttttccataaagaaataaggtgaatcgcaaatggtgcaactgttatcataacccatgactttaggtacaggtatcccgccatgacgaatagccagttccattgcctgcacttcactgaacatgatatttttttcataagtcataacgcgcatttcttttgagggcgcaatttttaatattacctgttccccgttactcaaatggatttcataggccatattaaaatacccttctgttagttcgtgaaaactctccattctaagcggtgtaaagtatttttccaccatttttgatatagtttccttgttctgcttgttttttgtcaggctctccattttttattgcccctttctctcaattttatagttatatacggccaatccagcaatcagccattccgtaaaggctaacagccaccatacaatatcaaggctattcgaccaccatgctgccagtaaaagcggcagacgaataataaaaatactttccaacgacaaaaacaggactttttttccatatcccagtgccagaaagtaagcctgaattacaggcattatgccgccaattaccaaagaacagcatataatctgtaatgcagattttcccattgcgataatttcagcatttgcagaaaataattttataacgtctcctgcgccccaatagatacatactgcaataatgcagccatatacaaatccagaaaatatagcataggacacagtcctttttacccgctcaaaacgctggcgtccccaatcaaaacctagcataggttggataccctgcataattccaaaaaacggtgtagaaagaaacgactgtattcttaatatcaatgtatatgtactgattgcttgcgtaccgccaatttgtcctaatatttggtttccaacgataccagccaaactacttccgaggctattaagaaaagcaggcagaccaatatacaatatttctttacacgcctgcccactccactttatgtctcccagtgtcacccgacaaggggtttttttgcggacaaaaaagtagtagatgctgattccagcagaaaaaagctgtgcaattaaggttgctattgcggcacctgaaatacccatttgaaagccatatataaacagtgggtctaaaagcaggttaataattaccgggcagcaccattgtatagtagaataaaagacatctccctctgcccgcataataccagaaaaaccggtgctgatgatagtgcctatcagcataatctgcccatattctacggcatatggataaatttcagaggtacagcccaataactgcaacaacggtttaaaaaaaacaagtcctgtaattgtaattgtcagggaacacagagcccaaagccacatcatacagcccactacctctttcccgccagccggattccgctcgcccaacctgcgggatatagtagaagcgctacccgttcccaaagtagagctgataccattcactaagagtagaactggcgaaaaaaccccaatagcaccgcttgctacacttcctattccttttgatacataaaacgtatctgtaatggtatagatattgtaaatcataatggaaaacgtcgtctgtgtacatagctccagcatgagttttccgattgaatcctgttccaatctattcttaacttgttcctttgccataatagagattcctctttgtaaaagtattagagtgcagtctttcatcaggtcacatctatacattttacatataagggcaattatattctattcattgatttgtggaattttctatactcattttactatagttttttcgatattcagtaggtgaacacccaaacttttctttgatgccttgataaatggggacagcattttggtagcctaccacttgtgcaattttttccaccgaataatcagagctgcttaaaagaacagccgccttttccagcctgctttctctgactaaatcctgaaaattcatcctgcaattttctttaataactcggctcaaataactttgactaaaagaaaaaacatgagccaattcttccaatgtgacattttcactgtgattgtaaatatattgaagaattgcaccggcctgcaaggagctgtggggcaggcaatacctgcagcacctgtattctttcggtcccctttcaagaaaaatcattagaagttgcagacaactttttattgcgacctcataacaactttgtttcaagtagtattctgtcattatcttttctatgagaagcttcccgccacccatacaatgacaatattgtaaatagttataatactctctctgtggagattttgcgctcacgaaaaaatcaaacagggtactatgatgattcattttctgaataaaatcataggaaatccattccataggaacaatcattttaatcaaaacagactgttcatcttcctgctgtaaagcatgaataacgctctgattcaacatgaataaatcgccttcctgtaatacaatacaggtttcaaggttttctatgaattgtttgcagtgtcccttgtatacataaagaatttctacaaaatcgtgcttgtgaaaatatacgggtgttctcttgatatggatttttgccgaaaactggttttgcacccttattagaatccacttatttatttccgcctataaagcgtttggaaattgataggtgccatctttcaatgacttctgtaaatcatcgtccaattcatattcgtcctgcataatcacattcaattcacgatccagccgttctgtttccagcttttttgataaagccaatatgtcattaaaatttttcgtaatttccatatggcatcactctctcgccagcaagagtatctagcaaattctatcggttatttatcaatctgactttattaataaccataggtactacttttctgccaatcatagcataacgaattataaagtgcaatataagcacatgctatagtttaacggaatagaggatagttgtatgcaaaaaatttgcgattatcccgccaacttgcggcacctgccgtttctaccgcccacactggaaatatcaattctgcgtctatgcagagtgtccctaccagccgggcaagctgaccgcctatggagcgatcaaattcacagtgaaaggagttgatgaagctatggcagttttccgcatggaaaaaaataaaggttatacggtaatgagcaaccaccacctgcgaaaacgggacttgtcgctgaaagccaagggcctgctgtcgcaaatgctgtccttaccggaggactgggactacacgctaaagggcctttcccttattaaccgagaaagtgtggacgcaatccgaacggcggtgtggtagctggaacgtgcaggctatatcacccggcagcagggccgcgacgaaaaaggcaagatggccgacatggtttataccatctacgagcagcccccgtcagaccgccgcccggtattggaaaatccaacgcaattaaataaagagatacaaagaactgacttaccaaagacagaaaaaataaatacggattaataaagtagtcattccattcctatcctttctccctcccctttgcggggtgacgctgctgtggcagcgccggaacggaaaggaacggaagcgtccagacagagcgcctttgaaatctatcgggagatcatcagggacaatatcgagtacacccacctgtcaggcgacccacggattgacaaagaccggctggacgaaatcgtggagctgattttggaaaccgtgtgcagcgcccgtaagacaatccgtatcgccggggacgactaccctgccgagatggtaaaggcaaagctgctgaaactagacagcggccacattcagtacgtttttgactgtctgcgggagaacaccaccataatccgcaacattaagaaatacctgctggcggtgctgattagcgcatcgtccacgacatactgtcacgccaggcacaggcgggaaaaccgggatattcccaatccctctataacctcaaggacgcggtgaaaatgctgaattttttacaagccaacaacatcatggatatgacggggcttgatgaaaaattcaagactatgataggggaacaactggatatttaagggaaactgaaacccgttgaacggcggttaggcactctgaaaaatcatatcgagcaagccgacatttatttcaagtacaagggaaagaagccgctgaccgaagcggagcaaatcttgcttacggcggtgaaagattatctcaaaggcatgatgaacggcaagaccacaatcccgacaaaggcatggaaagatgaatacaccaagctgaccgccgagaggaaaacactcaatcagaggtatcttgcattgaaagaggaagtgaaagaagccgagaaaatcagaaagagcgtttacagtatcttgcggcaggaacagagggaacgcctgacgatgaacgggcgtcccaagcagcccaagtatgctcggaataaaaacgtgctggtgattgcgaaaaaatccttgtgcatgaacgcgtccgaaaaggcagcattgaaaccacgcaggaggttgagatttacttcaactttgtgggccgatatgtgccgccgcacttcggggaaagtcatcctcaccccggaggaacaggaggcgctacggaagaaagaggaacgcaaggacaggctacaccagaattatttgcggcgcaaggctaacggcaagctaaaggaatacgaggacagaataaagaccgagaagcgccgacagatggaggccaagaaagcggccctccgcgccgaggacatggcgaaaggcgtgttctatatcgctggaagtgtgccgacacaggatccgcagaaaggcataaattttccggcccgtgccaccattatttgagtcaaaatgcgccgcaacccaaatgcaacctataattgcgtaatagttggtagctgcaacatgataattttgataggataaagccataacaaagtgaaaggaggcgtactcatatgaaattttctttagcgtctattttgattggcgttatctttatcggcgtgtttgtaactttgtttgttctcattgttcgtgctttcttgaaatacttgaaatcaagtaatgttcgtaaagagaaagccgccgtaagcaaatctctcggtgaaacactaaaagaacatcgtactcgttgtcaaatgacacaagagtttgtagcagaaacaataggcgttagcagacaagcggtgtcaaaatgggaaaatggaacatcagacccaagtacatcaaacttatttgcgttagcaaaactgtatggtatctcggtagaagaattgttgaaagatgtaaaatgatttgaatagttgccgcacgacggcaaagaaaaaaagccatcgtgcagcagcctgttcccctgtcctttttatggcggctttgagaaatcaaggccgctgttttttgcggccagtggagggccgtcatgagcaaatatcccttttaacgcgcccccgaattggaggaaaacccacaacagaatagcggaaacgtccagcaagacgcaggtgaaaaaccgaccttccaaaagaagatggctgggagcttttagggcaggtagtctctgtcaacaatctggaatggcctgttgaggatttcatcggcactcatttaaacgtaggacaggagatttactgggagccgtcagaaccgcaaaaattgtatgtaaaatatgacaatggctttgcacttttgtaagcgcaaagtattagggtggattgcgccataccacaaattccttcataatgagcatagctagatgcaagcattttgctccacaattcatgaattgttatgatagatgctggcattttactacataattatggaggtgtttcaaacaatgtctacttacaatgccagagtaccagccgaccagcagtatcaactgatcatggaatgccggagcagcggcctcacggattaccagtggtgcaaagagcatgggatacatccgggcactttttacaactgggtaagccgcctgaggaagaaggcctgccatgatataccggactcggtttccagggaagatcttagtcctcctgctgtgcaggaagtggtcaagctgaaccttattcccaaaacagacagcaatcctggcggctttctgtctgacggtccgattcaagaaataccgcaacaccaggctccacttgccgccatgatagaaatatctcttggccgggcgaccatccgcattgccaatggtacggaacctgccatgctggaccggattctcagcctcgtgaaaggctacgtatgctaggcgatatttctgtggccgacaacattttcatcgtctgcggcacgactgatatgcgaaagtccatcgatggtctctgcagcattatccgggataaactttctatggacccaaaccagtcctccctgttcctgttctgtgggaaacgatgtgaccggatcaagatcctgctccacgaaccagatggatacgttctcctttataaaaggctgagcgtcacgcagggacgttatcgttggccacgaaaaagctcggaagctcaggccattacctggcgtcagctggactggctgctcagcgggcttgatatcgaacagcccaaagcgatccaggcctgacaaagatccgttgtgaaattgctgaatttttcgagctgtttctcatccgggatcgtggataacaaatccgtgttttgggagtttgcggataagttctcaggaatccacttttagcctgatatgtcgcagatccaaaggcttatcctgtggctgaaagctcgttttctggtgctgatccgaaaatcctggaaagttatccaccgtcattatgacgagactgcgctctagcaggattcactttttttcatgatttctggtaaaataccagtaataagaaaaggagtggcaagtccatggcacccagcactaaggatatccagttcagggaactgaaggatacgatctcacaactgaatacgaccatccgtacccagaacgacctgatccggtctctgcagcggatgctggaagaacgcaatgccagggatgacgaaaaggaccggatcattgcaaatctgcaggcacagttcgagtatttcaagcagaaactttttggcagttccagcgagaaacggaatgatcttcccgggcagatgaacctgttttcggagactgtatccgaggaggaattcattgaaccgaataccggtaagaagaaacgtaagcccaaagcgggttatgacgagatgtttgctgatctcccagtctgccgtgtggaggtggataccctgaccgaggagcaaaagcactgtccgttgtgtaagagccggatggtcccgatcggtcacgaggagatccggaccgagatccggtatacccgggcgaagctggaacgtgtcatctatatcgcgaccacatatggctgccacgtctgcaaagaaacagaagatccacagtttatcaaagacgaaggagtccctgcattgatccctggcagctatgcgtcttcctcactggtgtcccacatcatgtacgagaaatatgcagatgcgctccctctgtcccgacaggaaaaaggctttgaacttcttggtgtcagcatcagccggactacgatggccggctggatcatcacctgcgcacaggattatctgcagccggtgtatgactactttcacagacagctgttgaaaagacactatcttatggcagacgaaacacccatccaggtgttaaaggaaccagaccgccggccccagagcaagtcctacgtctggctgatgcgttccggagaagaccggctgccgcctatcatcctgtatcactacacagagaccagggcaggaggaaatgcggtcggctttctggaaggaatcgatgacggcacgtatgtgatggtggatggatacagtggctataacaagctaaagaagatacgccggtgctgctgttatgcacatatccggagatatctggtcgaggccattccaaacggtcatgataaggactacagccatccggcagtccagggtgtcctgtattgtaacaagctgttcgaatacgagaggggctataaagcaaaaggactgtcctatacccagatatacaagcgtcgcctgaaagatgaaaaaccggtagtggaaggttttatccgctggctggatgcacagaggccggaaaagggcagccatatggatcgtgcagtgacttatatccgaaatcgaaaagacacgttgatgacatatctcgaagacggacggtgcagcctgagcaacaatccgtcggaaaactcgatcagaccggtgaccctgggacgcaagaactggttgttcagtgacagtccggcggagccaacgcaagcatggtagtttatagcatggtagaaatggcgaaagctcacggacttcatccatacagctatttgaagtacctgctggatagagtcgcccaagtaccgatacaagcgatgccgaactcgcgaatcttgcgccatggagcgaaaaagcgaggatagcatgtagcaataaatcagagtaacaagctaacaaccctgacatcagtggctggtgtcggggcaaatgtattggggacaccctgatacttggcgcttaccatttaacactacctctattactcaaaccacaaatctaatccacaagaacttacagctttgattcttgatggctatagcacctccactactgtttggaatgcctgcgctacttcatatgtctgtatcatttgatttttataccattaatcactattgttctgatttcacagtttctctttttcaaattaaactcttttacaatttcatttccaggtacatcttcccccttaatttcaagaatccacttaccatcttttaaaattatttttatcattacattatcacataggattcctgtttctccttccaccacttaggtagcttcaccattaataattacacataatgcatgtttcccccagtcaacctcatcgagatacctaatatcaatcgtttcttctaatccatctccatcaatatcgattgtgtaaatgtgcccagcggaaacatctattacgcttccatagggagcttctataaccggattgttcctccattccccagtcaattgaatcactctctgtctcctgtctatgggattaggtgcatatcccatctcaaaacccgccacggaatcgccttcaaaaaatacctcaaatccatagtgatttccatatagtggatctcttcttccataatagtcgttttcccaaagtgaacgtaaacgtatagcataatttgttaaattttctttttttgtacctttggatattccatccacattaaactcaacatttgcccagttaccagactcattcgttttcatccatacaacatccccccttcattagcgcacggctctttaccataattccataaaatggaagataccttctgccctgccttttgtaaacaaactcttttcctccccccgacatcaagttctccaatttcttccatactccatccatttctaattaactcctttaccgggaatggcatctggtataaataatgatcaaattcaaatatataatcataaggattatcgctcttagattccggttttacataagaggtttgaataatctggtctgcgcctattctttgatttcctggggcatctgctatattttttataaaccgttgcattatatatccaccaaaaatactgcttttatccggctttaaggacaactcaaaagagtatatcattccatagtctggttcagattttgttattcccaaaacgcttatataaccatcatttagcaagagcacttcttttatctcaaactctaaaacagattccccttcttccaggataggtaatgttataagttcattgttcacttccgcttccgcataattatttttcaaataattctctaatcccttagccggaaccatgcctgccatactaattagcgtcataatttcatcaaaggtagcactcatgccctcctcatcaatacattggacattattttgaagcatatctgtcagtctatccctaggttttgcattggcaagtccactaagaaagtttgcctgtatctcaatgtttttttgcgtatcttcactacagacagcattatctgatagaaaatctataattgaagaacccgatgcacgattcaacgcgatagtcaggatttcgattctttctttttcttcctctgataatatctttttggggttttcattcttatcattactatacgttaattcattgttttgacttatttttgatacactgcagccactgactagaataataacgataagaataatacaatataccttttgagaaattctatttatcaactctctttcctccaataaccagacattctattttgcagattttcgattgttctagttgcaggtaactttttataaactttccccatgaccaaatcgtaactttacccgttacactatcatatccatcaattatttctacatggtgacagttattatgttgcactgatatatctccttttcgaggaatataactttgatcaaacttatgccatacaaagccagccccctataatgcatatcccagagacggcttatagtcgggatcgtccttgttgtaagccctggaattatattgtgtagacgtaataatacctaaatatactaaacaagaagatacataggatgaacaatcatcatatactgttttgcctaatatatcaccgctataaccctttctctgtccttgattatcattatttaaatatgtatttacattatttacatatcattttccaatctcctcaacgcagctcatccaatcatctacatcactttcgtttatcggttctttaccatctgtcacgtagccagcttcatcttcttcttcaaaatagtacaattttccatctatctctttccagccaagtaccatgtactttgtctggcttcagctgtagtttccatcccctcacttctttccggatggatttctttgccttttcactgattgccggcagaaagttcgtgaaaaacttcccgtatctgttctttgtgtgtctggagcggaacgtatatcccagaaaatcaaatgatgtattctcgtgacttcctctgcggtcatcatctttgcagtatacaatccttgtcttttccggattcagctccagtccatggtcacggaatctttgttccagtctccgcttgagatattttgcctgtttcagtgacacgcagtgtgcgattccatcatcggcatatctcgcccatggtatcgtcgaaaattccttttccatgaaatcatcaaacacatagtgtaggaacagatttgcaagtaccggactaatcacaccgccctgcggtgtaccggatgtccttcctacaatggtaccgtcttccatttggaatggtgccctcagccatctttcgatatatagaagtatccatttctcctgtgtatgcctctttaccatttccataagatagtcatgtctgaagttatcaaacagcccccggatatcagactctaatacccagtcttttctccagcacctcatccttgtgacttccagtgcctgtatggctgacttgttcggacggtatccgtaagaatcttcataaaagattggctccacatttggctcaaaatacagctttgctaccatctgggcgattctgtcctctacggttggtattcccaggattctggtccctccatttttcttcggtattgctgccgcttttacaggttgtggaaaataggtgccggacgacatcctgttccatatcttataaagattattgttaagtttcctttcagaatcttctatggattgttcatccacaccgtaagttcccttgtttgctttcaatttttggtaagcagctatcactgctttctttgaaatactgtatggctttgcttcttgcataagtccctcctcctttcaaagttgacttatccttaaagctggataattcaggctcttcgctccgtccccattacagggatttcctcactgctacagcctaatctgcccccatggctgcatcggtactcttatcttacggttcttccgcttgatatactcccttagcatcagcccgtgggttcccacgttccgtacagacgcctgtgtaaagttcatgccgcctttatgccgcccaccgcctggtcggtaaacaggtttcctccagacttgtcccggattaacgatttcccccccggttttgatggaatctctacgctttcgacatttccgtaagcggttcatatgttcattcatctcctttacacatacctgacagttagaactgccttttccctaacgctcaataccatggcttttgtccacagcaccttagggtggtttggaacctccacctgtatggcggttctagcgggctctccgccatcatctgtacagcatagctgtcctcaagcagctacgctgcttggacacgccttcgtggcgcaccatcatctgcatatctgactataacacccagttccttatgattctcccagtagttttgtggtgctgaaatgttgcccggtcttacaaaacccccctgtaaggagatacggcaagagaaaggaagatatacgaatactcttgattttaagcccttctctcatggtatcataaatattttatgaggacttataagaggattttcgtctatcgaatcaattaaaaaagaacgctgtgccctggactttatgggaatggagatatacagcgcaatcaatacaatagtgcttgtacacggtcactccttaatcatcaccattttatcactattgtcctgagcaaaatcctgtcaccatcatcggatttaatctatatctgggcaattctgctcttgccaaaacagaattggataccttactgaacagtgtgaagaaggaggccatgcttgctgtagcatgctttatcgtacattctcatactcgcgcaacattctcatcaattccaaggcactgcggaaagaagtgcttttttcttgactacattttccttttatacgtccctgcaaactcgaaaactgacgttgaaaaatttcaatcaccatggtttctcttgcatttattgccaaagggataaatctatctctattttgaataaagggattatattttatagggataagagactcatttaattcccgtgcctcgaatgtttttctcatctgtttgctcaggaatctgggatctgtccccatcggtctgccaagcctagtgcataaaacatcaagttttaacacaaggtccagtattccgaaaaattctaccggttcctctatataaaaattagctatacttccgctcaattccccatgcctgctttgtacacagataagaaatatactaacccgatctgcattttctaataactgtaagtcatcctgcatatgtctcacctttatccatcatagtaatctgtaataatgggattcctgtcatatactcatttacaacaaaattcctcttttgttgtaaaaaatctgcatatactatccattattttactacatatcttcaaagatgtctatatcaaaattatgcaataatgtttttaggtataataaaatggccaactgaaattttttatgttggcctattcttggtacttgaatattcgtgattcaaaatttttttttaaatattaatgtgagcatcatcctattttcattaaacttaagggtgattttacaacaaaagaggaattttgttgttaaagtcaaataatacatccagtttttccaattgtcttatataatctcgtccactctccattgtataaatgcgagttgtattaacattactgtggcccaacatatccgcaagcctaattaaatttttttcctgttcgtagtagattctggcaaacaaatgccgaaaattatgagggaataccttatctcctatgacacctgcttcttcacacaaacttttcatatttctccatatattacttctatccacggcttttccatttctcgttacaaaaatcatccctttgtcaatatgatttcttttcgcgtagtccattagcatatgacagagacggcttgtaaaaaaaacagtccttatccttcctttacactcaatttctgcttttccctgttttactgcttccaaagtaatatacggcacctcagaaatccttatccctgtggcgcatatggtttgaagaatcattgcaatccgttcatccccttttttataagcagatttcactagacactcatactctctcttactgatttccttgttctctggacaaaacacactgcggctcacttttagaaatttagttctgcaatccttccatgcataatatgaaaaaaaaccattaatcgctgccagggcactattaaccgttaccggcgctaatttctcccttaatattcctttccacataataacatcatttttttctacactttttccattcatatattgcataaacaatacaatataatgccggtattgcttaatggttccattacttttttcacattcatagagccattggcaatattgttcaacagactcttttgtaattcttctcttatctggattactgcttcttatcattacattctgctccttacattatataatacttaagataatcatgccctaaatacacatgattatccagatgaccagcaatcgtcctttttacaggatttccatatatgatttctttgtataatgatttgcctgcttatgtacggagcctatttctaagggagaatatcataaaacacttattctctcagattcaaaacactataatatgcaaacacaaaaaggggcgattctatcgttcctctgttatccttgaattgtccgttttcaattaacttattaaaaaatcctgtaaactgtcctccaacattttacaggattttcatatttaatctcgcatttacacattcatatgcatgaaagatttcccactatgccaatgtattcatcaacatgcctacagcataataattccctaaattatagggactgctcttggcaaaattgtaaaaatactgatacatcgaacgatcgtaattttgcttctgacttgaagttgttcccttctccgctgtccccttcaaatcattgctcacaatccgctgtacagaatctgaaagagcagcatcagtgcgggctgcaactttttcagcaataccgaattggcctcctataatagattttgttccatcgaaatctgtttccagagcctctctcagtttcttttcatccagctgcagttttccatccttatcataagaaattccaatagccgccaatgttttctcatcagccatgcctctgccaaaggcctgtgcgtgggcagctgcgccagttcccctgtctgaatttccctgaagcagggactgtacggaattatatccgtttactaaatcttctacagcggataccacctcgtcctcatctattccagtataaatcctggtttcaccggtttctttcagctgctcctctattcttccataatctaaactgattctgttggacgcggattggaactcagtagtaatcccattctcagttacactatataccgcatcctgggcaagaacagacgccctttcaacacctgctgcagctccggtttctccgctgacagaaaaccctcctgcctctccctcttttcccgaagtaaggaccagagagacctttccctccacatttgctacagaagcttttacgctggagccagcctgggcattgatggattgtgcagcctcctgatacatctgatgatatgttttggccgtgccgtcctcattagtacttccaatggatacagatacacgctttccgtcagatgtcattatctcgaagttcatatcatcccctgatgatacttcctccgctcccacatgggccgcgctggtattctgctgtgcctgggccagggattggacattcaagctgatatccgtatctcccttaaggctgtaggttccggaaacctctgccactttgctgttagtggatgctgcctggtaatcactaaacacattcttactgctgctttccttcagcctaaaagccgcgctttccaaagatgtaagctctttctgatagctccttagaaaatcctggcagccgctgctgtaggctgcggaggataccctgttcacaggttctaccgcctggtagcgcgatgtctgccttgcattggacagctggagcatattcagagtattttgatactggtaatagctgccggataatccattaaccgtcatgttcattcctccttttctgattttttataaagcctcgagtggcgctttatcattttatttgtaaaacgactttgtgccagctgctctcttatttactattttgtccgcatcctgtatctctttaatgagggccgctgtctttttcctaagcttcaggattttatcttcctcatagctcatcccttctgccattgacaggaactccccggacataagcctgtggatatcctcattttctctttgtcccttttcggccattctccaaatcagctcctggcaattttcaatatttcccatttcgtccgcacgcatttggagaatcaaaccggctgacacggaatcttcccgcgagacagcgtcctgcaaatcagccgtaagacgtttaatttctctcaggaagttataccgtctctgcagcaagaccatcacctgttccaaatccagccccatatccgtctatcccagcacccctctcctatctgtcatatgtacatcacttacctccctggcagcctgctcaaatgcatccttcaactcgctgagtatatggcttatccttccaatttccttttgctcccgttcccggcccgcctttactttgctgatatccagtattaaatagtcgtaaatcctccggaggtcatagctgattggctgtttcatatccaggatatcaattaaatacctcacaatgttggaagcccgtctcaggcaatcatcaaacaacgcatattccttatcatccaaagccaagtcagccttcctcaagcgtccaatcgcctcttcatacaataaatcaagcagttcccagctgctcatggaatagacactgttttctttgtatttttgataactgttcattgcattccctttctaacaggaaaccttttcatcactactaaagctggctcaggtagctggactggctgttcatctgattaatcaatgtttccatggaagtaaactgctttatataacggtcctgctctgtggaaagctgggatttatatttgttcagaacctcttccatatcctttaactgcctgtaaatctgattattcatgactgaaagaggaatcttctctgaaccagcctcctcaataagccgtccgtatgaatttccattttgacttctgtatctggtcgcatatgtggtcagtgtatcctctacaatatttgtaaaacctttagtcacactgccgccgcctgtaaatacatttgacactttatccggatcactggtcatagccgccctgaattttgcttcattaaacgttatggtccccccgtccaagtaatcatctgacatggtaatccccatctcctccaagtcctggtaactgattccgctgtttaacatctgtgtcatcacggactgcaggtccgtgctcagggaacgcatagtggaatcgttaaacagcagcccttcctttgcctttttctcccagttttcaatggaggtttcagtcatctcagctttttgggcatctgtcagaggaccatatgatgaatccggtctggtagtaatctgcttattgacttctgtaaccattgcattatattcttcaaaaaatttctttactgcttcggtcacgccgtccacatccgctgatgcactgaaggtaactgccatggaggtgtcagagatccatgaaccgtcctcctgcctcacatctccgaaaacgccggaaacagtgactttcataccgtccaagtcaaaggtatttgaggaactttcaacaagggtttttatcccattcccatagcttacaagcacctcagcgttccttcccgcttccaggcttccttcggttatcttgttggtatctgtttgtttgaagctgctgtccacaaattctccgctgtcagtcctggctccaaaaatggcttttgaagcgccatcaagggtaatctcccttcccttgcctgtctctgatgttaccagaacaaactggttggaacttgaaaggtaggaagcttttacaccggcatcttcagttgaattaattttttctatcattccgttaatggaagtgtcggctgtaactccctttattctgacgccgttaataatcaggccattttgattcaaatcctcaagaaaagctttcttttcctcatctgtagcatccggcagcaatttatcgatattatcacggatactgctctccgcgctcagcttattactggcccccttctgaattcccagtgtctttcttacatccgcgtccccggaggtaatggtaagtgtttggtttggggaagccgccggtcccaggtcgaattccaggctgccattttgattctctaccttaatgttgtctgttccaaatgcctgatccagacgtttctgcatggtctgctgaagttcatccaaactggcaaagctttcgcctgattttaccagctctatctcctttgtctgtccgccaaaactgaatgacagcttctttcccttcagaaaatcaaccatattctcactggatgcatatgtatctttaaagagcttctgattttctcccagcttctccaggctgattccgttggattcgtcctttccctccgaatcatagcccagtgccttcaatgcgctggaggatgaccgaatgacaagagccgttgtcttgccgttcttctcctgcaatctcataacgccattttcatatttaaactcagccacatccgcaagtttgtcattccccgacttaatgctggactgagccagggctttatttaatccctctgccagttcttccccgaacagcctgcctgtctcgctatttactgcatccatatcagaggtataatccagcgtgactgttatttctttcccattctcatccttatccgtataggaagccgggaaagtaaaggtaccggctgatttaaagctgtgatccgttacgctgtaggtgccgaattccagcttggttccttttaaatttgatgttctgtaaacttcatttgtaaggctgtcctccgtaatcccggtcttaatactttgggcccgcttgccggctgacagcagcgtagtggaagatgccatctgctttacacctaatatggacatataatctgtcatgcttgaacttccgctggctgatacaaacttagtcgcatctgtttttcccaatgccgtcaccctgttttttgcaaatacagaagcatccttcagattaaagccgctgctgtacgaaaaataattatcctgcaaatccagaatttttgcgctgacagactgatacgcctcctgcttccagctaaggcttgtcatcttcttattctggctggttatctttgcctgagtccctgctgtcatctgctcaattattgcatcgcggtctataccggaggacagaccgccatatccccttaaactcgtatttcctaaactgcttgttgcgccagatacacttgccattttccgttctcctttcatctcatactgattttacttttctctttattttatcggcattttttagaaaacaataaggaagaaagacaataaagttgaaaggccggccagagcagcataaataccgctccggccagcctggactcagtttttccgtatcctgctactctttttcgtcttccttatctttcttcttttttgccacaatctttataattcccccgattataacaactgctgccaacatataaaataataaatcaaccatactgtgaatctccttacatatcatttttttatcaaaagaagtcagcgcatatccttcagcctaaaacggcctacaagatccttaagcaggcttgactggcttgacaattcctggcttgttgccgcgctctcctcggctgtagctgcattagtctgtacaacagatgatatctgatcaactcccgtagttacctgggcaattccttcagcctgcatactggccgcttccgtaatctttgccatacccactgtaatcttctgggctttttcaacaacattaagcagggaactttgtgtctccctggcaatccgtgtcccctctgccactgcttctaacgagtggttaatcaataccgttgtatcttttgcagcctccgcactcttggatgccaggctccgaacctcatcggcaaccactgcaaagccctttcccgcagtgcctgcccgcgctgcttcaactgctgcgttcagggcaaggatattggtctggaacgcaatatcctcaatggttttgattattttttcaatttcactggaactctcgttaatccttgtcattgcggacatcatttctttcatttgctgattgctgccctctaccccattgcccgcagcctccaccagcacattgatgtcgccggaattttgggctgtctgcttaacctgctcagacagttcattaattgtagctgccagctcctcaatggaacttgcctgctcggttgctccctgactaagggactgagcgccgctggatacctgctctgatccgctggccacctggttggaggcccggtgaatctgactcagggcgtcattcaaggtgctgattatcttgttcccggaatccttgatggatgcaaattcgccgagatagtccatatccatctctatagtaaaatctccggaagccattgagtccaggcggctgcatatatggcggatgtatgcagacaatgtggacagaacaaagcgcaggttctccgcaagtccgccaagctcatcctttgaagtataagtgaccttagagcccatatttccattggccatttctctgacagcgttttctatctccgttataggaaaaaccaattccctggtcaggcgttgggttataaaaactgtaataaacaaaagcataagggcaaacacagacaaaaaaacatagctcatgcggacggtagccactccggaatcataataaaactgggcacttttctgagactcctctatcacgttctgaagcgccgtatcaaaattcccgcaggcctgcctgtattctccctcaattacaagaagggcgtttttgtcatcccgcgcactgatatactccaccgctttgccgcggagggagcttacatttgcagacgtgttctcaaccgcctgccataaagccgggctgccattccatgcgtccttaagagcttccagcgtaacggaaagcgcagacgcctcgccttcaatctcacgcatgattgactgaatctgagcgtcatcatcaagttcataagaacggtacacgttcagctgaatcttccttgtaagcgcctgcgcttccacagccgcctttaccgatggatagggtacgcggtaaaattgatccagcttattaaacatgcggttaaatcccataattgtaactaaaacagctattatattaaaccctaaaataattccaaatccaatctgcagctttcttccgacttttaagtctttaaacatttttttctcccccgcattaataaatcatatattaccatacacaccagggttttattgcttacttttctcttgattatttaaccctggagaagccgaagcgcaaattccggcagattatttgcatgggagagcatggcattggcagcctgaagcaatatattttccgtggtaaattctgtaaacttctcagccatatccgtgtcacgtatcccgctctctgcagccgtcatgttctcttttgtcactcctaaattattattggtatgctccagatggtttaaagttgccccgaaagacgcccttacgtcagccaccgcttcaattgccgcgtcaatctttcccattgcctcattggcagtctctccgctgcgaaagctgaccttgtccagaagcaattctctgcttcccatataataccgacccacatccatggtttcttccgatgaatgaccaatctgaagcactatgttatcctttaattccggcggtgtgaagccaggcggaattgtttctgcggttccaaacaatggtattccagcaaaatccgttgtctggctgatacggtcaatctctcccagcagttcctgacgctccatatcaatatttgccctggctactgaatcatatgtaccattggctgcctggacagccaaagtcttcattctctgaagcatggaatgaacctcctgaagcgctccctcaccagtgttggtcatactgataccatcgttgttattgcgcatggcctggtccagccctgcaatctggctgcgcatcagttccgatatagccagtcctgccgcatcatctccggctcggttaatccgataaccggaagacagcttttccagagttttattgatttttccctttgctataccctggtttctggccgaatttattgatgctatgttgttctgtatccgcatctgtccttccacctttctgctttgttctatattccatatgttttaatatcggcatattcgttaaaaacataagtatttttaaaaaataagcatcttaagccgttctccggcaggttcaaagctggcagccgcgtccttataatattttaccgccttttctgtctgacctgatacttcataccataaagccaggttgtatgccgccttaaaagagccggtaccagtcacgccgcccgggcgttcgccaatccgaagacattccaggaagctgtcctcaatcctgggcagaaactcaatatataatgaaacatctgaaagcaccagcttcatataaaacaaaccgcatacaaaccagaaatccgcctggtcctgcatatatgactgttccctttttacaaccgcgaaagcctcggacaaaccggattgtgttccggtctccagcaaagcgtacagataggaaaccacaccttctgaccaatacccggatttccttgatgcattattataaaattcccgaaaccagaaaaggctttcctgagacatgtttgcgtttcgcagtgtaactgccatttgaaacctataatacatatcttccggatagtaccggaccgctttctttaaatattccagattgcgcctgcttttatccgtatataggtatccatcgtgctccgcttccaggggaagctttaaaaaggggcctgtctcttccggctgctcgtggataatgccaaaatagcaggcccttcttggaagaagcctagggagataagtaagactgctttctgtcctcccctcctccttccaaaagtccctgcgcagtaggctgccgatccatcttccaccatatctggcggaataatcataaatctgccgctccagtttttctctgctgcaaggcagcagatactcatccgcatccaataccagattccactccgcgtccgaatgcctgagggcaaaattcctggctgccgcaaagtcgtctttccacccatattcccacacttttgctccatattttctggcaatttccactgaacggtccgttgagcctgtgtcggctattacaatctcatccacaagccctccggcctgctccaggcattgtcccaaagaacgctcctcattttttacaatcatcacaagattgattttcatatcttctcagagcccttttccctctgtttcttgtatacaaagcctcgaatcgctgcttctccgccgtctgtcagccccacaaaacggcagccatacccatacccttttcctccggcctgtcccacccgtaaaacctcaagttcaaaggggcgttccagtgtccggaagttataggaaaaagcaatcttctctccttttaacagcggctttttggttgtcatatagagaccgccggcagataaattccggactgtcccgaaaaaggcagacccatcgctgcatttcctgaatttaatatctatctttatttttacacggatatccttttggcgctgcaccacctgctttacatccagtataacgcactccgcagcccagggttccgcctcctcaggaaaggatggatttctgtgtatgataacctcgctcagcgttataatcatcccgcgtctttcatcaaaaaaatccactcttgttctaaaacgtccgtctgaaagcccatattcggtgaaaaaaagggagattttattatttgtatgtaccaccctggcttcagcaagacgttttcctttatgattatatacagcacaacggctgcaattttttaaaaccgcatctctttcatttatttccatttaattcaaatctccatgactccaatttcccttcctgcattcatcatcatctgtatgcgaagaatctgaatcaggctgttaaagctctctttatccataacaatctcgtccccctgctgccggaaagacagattttcaaatacccctggtgtgtttgtcaggctgtttccgccccagcctctgtacacgtcaaagcctgccaggaaacagctgttccccgccatgccgttcccatctatgcccttatacggacttctgacatcccggtcagctgtcagggtttcccccatatatcccattaccttttttacataattctgtgtctcctcataaggaggtatgcccccatatttctgaacgcttcccggacctgcattgtaagcggccagagccagcttcacatccttaaagcgatccaggttttctttcaaatattttgctcctcccataatattctgccatgggtcatatgggtccgcaactcccaggcttttggccgtgcccggcatcagctgcatcacgcccattgcccccgctttcgacactgcattggggttaaaatcagactctgttttggccactgcccgcagaaggtccggcgacagtccaaatgtttttccagcctgttcaaatatagcgtccattgccatgttttttgcgctgttctttaatatatttccaaattcacagctgttcttttcccgcttcccgctttcgcctgcccttaaacgcaatgactccgcttccgccacggttgaaattaatcccatggtaaatcagtcctcctctctatggtatttacgctttccggtggtccttagggattcaagtatgctgcgccgtccgcccctatctgccatccatccacagttgtatccacagccatggttccatcttctcttagataataccaacgttccccgtctaacagccatcctgtcttcatcaggccgtcttccctcaaatagtaccaggaaccgggggagggctgcacccagcccgtctgcatttctccattttcattcagataataccaggtatggctgtcaggtgaaacccagcccgtgcacatggcgccgttctggtccatgtaataccatctgcctcctgtctgcacccagcccttgacccggattccgctgctgtcaaagaaataccacttgcctgaaacctttttccaggtattggacgccctgcttccatcaggcattatgtaggaatcccccttaaattcccctccatcgtccggtctctgtgtccttttttcttcctccccataatcatcccagtcaaactcctgggatgtggaggatacatactgcccttccttcagatacttcttttcatccgcagtaatcggaacagccttgacctcataataatatgtcttatccatatcttccataaattccgcaagattagcgctgttggattccactgtcatccgttttactaccttattatccccatagagcgttaccgtgtaccctggggcatactccactgatttccataccgccttctttttggaactgctgctccagcccgcccgttctgtctctcccaatacggaaacaggtctgtaatccacctttatctgcagtctcgcgtcctccagggcgcgggccgacacaaaatcggctcccgttaccttacattcagagcggttaagggaagcaggaaaatatttcccgtcatctgcatttaccgtgatttctatcctcaccttttttcccggtttccatttttcatagtctgtcctgtactgaatatcctccagggtgcagccctttgtgcttacagtgattaccggctccggaattactcccgcttccccgtagtcagttttcagatttaccgaaaccttctcaatcacgctggactgggctccctccgcgtaaatacacggctttgccgtaaccatacatgccgctgcaaatgccagcatcagaccatatcttcttttcatccctgcctccttatctccagataccgtcctcgtctacacggaatccgtttatctctgcattatgcgccatttccccggagcccggataaaaataatgccaggctccgtcaatacagcaccatccttcagccatttctccgtttgtatccgcaaagtatgtttttccatccctcttaatccatccggtaaacatagctcccagaaggctgttatccactgtattcagataataccaatgtccgtccttaaacagccagccggtgtaaagggagccgtcatcattgaaataataataatacggccctatgactctccagcctcccgccgccatactgcctaacgggttctctccttcctgttccgtgcagaagaaataccaaagtccgtccagcctggcccagcccaccgccatctgtccattgggatataagtaataatacctgcctccaatctgctgccagcccgtaagcataatgccgtccacattaaaatagtaccaatacccgtttatttcagcccatcttccacggcacaattctccgctgggataacggtacctccagacgccgttctcttctgtccagccaacggtgtccattgttccttttgccactgtgctttctttgttttgctgtccttttccatcggaaacataacggtccgtaatctccagctcgcctgattcaatccattcacttttcttcccgtactttacctgcgcctctgtctccggtacggtcctgattttaaaactgtacatgcccttttccgtcatgtaggggtaaaagttatagcgcaggcccgatacttttgccagtttataaactgtcctgccatccctcagaagctgcgcctcataatatcctgaggtattttccggcttctcccacctggcttcccccaggttatcttcatgccagaatgcatcagggggcgggtcatactctccctttacgccgtttacccgaatggttacaaccagggcgtctccatcgcgccttgccgatacaaatgttcctccgctgacttttacgtctgatttcttatagcttgccagaaagtagtcctcacccacatcagcaggttcaagagtcaccttcatccgcggttcatccgcggctttgattaccttatcccccttgtccacccactcagcttccgtcacatgatatttactgttgctgcccgaaacgcttatttccccgtccttcaggctccgggtcccaatcccgattgaaggcagacgccctcccggttccagtttggaattcactttcacgctgacagtatggatgggcctggctgccgcctctgcctctgacggcattcccagcatcagaaaacatatggccagagccattcctatccgccgtattttcatagcccctcctccggtttataatccaaaaaatacaaatatatttccaccaccgcctgatacagttcctccggtatggctgaacccagtttcatctgactcagcaggactgccagggaatcatcctcgtatacaggtactcccgcctcagcggcggcttccgtaattctctccgccagataccccattccggaagctacaataatcggcgcccggttattctttgaatcgtattttaaagcaaccgctctttttttaatcaggttgtcaaattctgacattgactccatgccccctctctcttatttccgggaaagcatcctggatttctatatccctgtcttttccctttaccagaaaacggtttactcccataccgtttttcttaaaaatctcggcaatgcctttctggattacatcctgctttttaaccaaaatttccggaacatccagctgcatgtccaccttcctgtcctgaagggacaaaaacagctgaaatccccctaaatcctgcacatcaaatttcagcagcagtttaatcctgcgtccccccatatccccctctttttctgaatccggattaatccataattccgacatgacgtccttttccctgaacctgaaagggagcagcaaatgcaaaacaggcatatacacgctctcattcaaaagcattccgtccagcgcgttatgaaactgctggacattctccaatcccccctgtccctttgccccctttaaaagaagggcagcaaacgcgtcggaaaaagccctttctctttctgattgcttcagggtctccaaaatccgggacagatcctgatcccctccgtttttgtcaaaacgctcatattcacggtttccggtcatgcgctcatatagctgagccagcctgtccctgcttccgttctcataccgcacggcatggaaaacaaacagcataattgcatctctgaccgccccatagtcatgggtcctggatatgtaattagataaaaaaggaatcaggctgttatttaaaaccgctgtattagcagccgtatccccattttcagccccccactccatgccatccagtatctgttcaaactcatctctaaagccccgaaacatcagctggtttatatcctccgcaatggaccgcatttgatggagaaaatgctcccctgatgaaaaatcattataaacttttaaaaaggaaaggacggcttcccttaagctgtcagacgccccttgtcccaggatactcctcagcccgtcaaaaaaggcacctgaaaactttgcctgcacagactgctgttctttaaaaaaggataaaagctcttccggcgtctccagccggactgaggccatcatctgttccacaagttctcccaccccggctgcatcccctgataaaagaccggtcccctctcgggcaaacagctgttccagcagtctggatgtctgaaccccttctccgatttttttaataaaagctccgtaattgctttcatagtctataacgctgtaactgttccctgatgccgtattccctgcgtcctctgtttcctgtccgtccgcccgtacaacacgggatatatccaccggattgtgaacctgctggctttcctcatagcctccggttttctgtccgtccggtatatttctgtcaggcctgacagggatattgcttacctgcaaaatatttgccataatacctccatgaataaagaccattctattcctattttaatatcggcatattttcattttccattagcactatatttaaaaaatatttagatagtttttcactcaggccttattatctgcaaaaaagagccgatataataagcatgcggaagcttcattctggcaaaacatctggttttgtctgtgagataatggattcatccataaagggaaggaggtttttatgaatattaaaccatatataaacagagccggaggattagattacgtttctcccgcttcttctgcaaatccgtccagagcatctgcggggcgcctgacatgtgattttgacagggtatcccttaaggaatcctctcattctccggatgacgcatcctttgcccgcgccctggcccatgaaacagctgtcaagctcgaagcaggcgcaggcagggaacggattctctctttaaagcagcaaatcgaggccgggacttataggccggattccaggcgcatagccgaacatatgcttggctaccggtaacaaaaatggagggaatatggataacacgctgaatgaattcgcctgttccatcactctgattacggatgccgtgaaggaactccggcagattgaagagcagaaagcaatttccgcttcggaagggcggcacgataaaatggatggatttttaaaacaggaacaggtatttcttctcagactgcggggcctggagcagagcaggcttcgctgtatggaagccatgggctggaaagaccttacgttccgcgagatactctccggattacccaaagcgcaaaaggaacgcctgcttccattgtttacagacctggacagggagcttgggcttctgctggatgccaaggacagcgcgcagcggatcattaccctccgtctggctgagtttcagcaggcccttttgaaacggggacagtcaaaccaactatttgaaaggaaagcatgatatatggtacgagctacatttgccggtttttccactgctctttccgccctgcaggcgaatcagaagcggctggatatagtcggacagaatctgtcaaacatgaatacggcgggatatacccgccagcagctggaaacctccagcctgaattatacaaaccccattgcccattatatgaacggctctgagatagccgtgggtttcggcgtccatatggacaaggtttcccaaatacgtgacccgtatctggacgcccagtacaggactcagatgaaaaaggccggctacgctgaatccatgcagacctccctggacgttctttcaaggccgtttgatgaaagtaatattgatggaatccgcacagccattgacgatattcaggccgttctcactgacatgcaggatttagacaaatttcatgacgcagtatttgaaagcgaccttcgttcccgcatgaacgaactcaccaatcttttaaatgacgctgcgcggcagattgagtctgctgaaaaatcggaattttcaaagctggacggtaaaggcaccagcgagaatggcgctgtcgacacggtcaaccagattctgcagcagattggggatttaaaccggcagattaaacaaaaccagattctcggacagcaaagcctggagctgcaggatgagaggaacaatcttctggatacgctttccagctatatccccattgaggtttcttattttaaagacagtgaccatgacggcgttaaactgggcgcggacggcgttaccatggaaaacgctccggaggagttatatgaatacgaccactacggcaatattataggaagaaaggactggccggacgacctgaaggtggagctcctttatacagctgctgacggcagtcagcagcgtctcacacttgtcaacggaacagagggcataaaaggcgaaaattacggttctctttccattgacggggggagtcaggatgatcccacaaatgcatctgtgaaatttacggcagccgtttcaagcgggacgcagtctgcatccgcttctgcatccggggtccagctgtccggaggctccattcaggccagtcttgatatgcttggaaaaaccggtaccggtaatcagattaacggaaccgctgttattgatgatgtaagaggttatcaatattatatgaacaggctggataccctggctaaaacttttgccgataccataaatgaaattaatgataaaaacgattttgtaccaggcggcggaggcggcggagttcttcttgccaataagcagaacaactccacggcaggtattacggctcttaatatcggtataagtgaggattggatcagcggcaaagcccatattaacgaaatgagggataatcccacagacaccattttggatatgctcgattccatgacggatacatatacggatttggataacaaatcatttgttgattatatgaataatatttccacagtcttggccaatgattccagttataactccaacaccctgaaaacagacgttaccgtgttaaacggcattcagaattccagggattccatttccggcgtcagcatggacgaggaaggagccaatatgatgtcctacatttctgcatacaatgcggcgtcacggctgatgacagtattagacgaggcccttaatacattaatcaacaataccggcttggtgggaagataatatagaaaaggaggtacttttattatgcgtgttacaactactgcggcttatcgtaatttcagtggttctgttaacgatgtccacagccgtctgaataaaagcatgaataaaatatcaagtggaaaggcttatgaaaaagctgctgataacccccttgcttactatgagggaaaaaagattgacaaccagtatctggatacactgagtaaattgaacctgatacccgatgtaaaaaaccgcctgtatcagcaggagctgggcatcagggatattcagtcacggttatcaaaagcaaagggccgcgtagaatatatccttaacgatacaaacaatgccgaccccggcttggtgcagactaccagggatgagcttctggcctttcagcagaccatggccaatgatttaaatgcccagtatcaggacttttacatttatggagggaatgatgtgtccactgctcccttctccctcagcgcggacggaaaaaccctgacctatacccacaaattttccggtgatacggaagtgactaaaatggagatgaccctgacaaaacaggcggacggaagttataagtatgaattcagcggcagcaaagggtctgctgccctgaatgaagaccagacgcttgatgccattgtccgctccatgaaagaacagggaaggatggatataggttatggaacaatctctgaccgcgaaaccctgatggatacctatacaggcggcctgaacgctatcaccggcctgtcctccgatgcggtaagggcaatggaccaatcgaatccgactggcctgcgaagtcaaataaaggatcttctaaacaacagccccattggattagtagggcaggccgtgcagacagtaaacggctacatggacggagggagcaaaacggaattttcagaatcccttggggcaatcatggatacaatgactgtgtccgagcaccggctcagcacggtatatagtgatttgggcagcaaatatgccattttggaaaatgtggaggataaactgacaacagacaaggtaagcctgacagagcaatacaaaaacaagctgggggcggatccctatgattcaatcattgaaatgtattcctatcagcaatcctaccaagccgcgctaaaggttggttcctatatgataggaacatcattatttgattttatgcgctgattcccatgttcgaactggaggtgatatcatgggaacgcttatcaaggttacttcgataccctttgaatccattcgttttacacagaatgcccgtttggttccatctgatagggtggcagcagaacggcagaaggcattatcccttcatcgtgcgtaccagcaccaataccgcggcagggggagttattccggttttgattttataagtcaggtcaggcaggcattcccttccggctcccctgcgcccgtcccgtcacagggtaccggattaccccagggggtatcctctttccaggctgttaatcaaaaaaacagcctgggttccggcacagcgtctgcatccggctatccttctgcctcaatgacaagctttactccaattgatgccggggaatccgcagcgcctgggacagcctccatggagaccgtttcagaatacctggtccaaagagaagcttttgaattccgcatagcaaaaggcgacttttcttacatcccgcccctgtctgtaacaattgtgacacagtaccctgaaattcgttttgagtacaccggtgaatttaactatgtgcctccccgtaagaacaccataggaagcacgattaatatacaagcataaacagcatcaaagaaaggcagacttttcatgaaaacgcaaaccgactattatggagaaatcgaatataatctgtccgatttaattgtggtggcagacggattctttggcttccctgaacttaaacaatttcttcctctccgcttggatgaggataatgactccctgcttttaatgcagtccgttgaaaactcccaggtggcttttgtagtcattgcgccaaccattctatgcccggattattctcctgtccttacagcggaagatttgtccgcactggatacacaagactgcaatgagctttcctattatgcagtatgtgttataaaagacaactaccttgaggacactgtcaacctcaaatgcccgctggctatcaatcctaaaacaaaagcggcccgtcaggtaattttagaaaacaccgattacggataccgccataagctgaataccttttccagcattacaaaaaaaacacaagacaggagtaactgccatgctgatactgcaccggaaaacgaatgaaagtattttaataggggattatatcagaattacagtgattgaaaattcatctatgggggttcgtctggcaattgacgcccccaaagatatcagaatcatgcgggaggagctggctattgcagccaaaacaaacgaagcatctcttcttccttccatcagttccatccattccctgcaggagatattggaacagcacagaaaggaagtccgggaataatatcaatccggcttctttttaaacagattgcttatgagcaatccctttaactgccgaattcccctccatatccagcagattggcaaaagaatcggaaaatcctccagtacgggatagataacacacatatatttatgttccggaaatacccatctcaacatccgtcctatatttttccgcctctttctccacttatcaatgaatgcaatcctcttttcccgggactgttccctattaatttcccgttggactaaacgctccagttctaatgcctgctggtccgtctcattgttcagaacacctctgctcaaaatccggttctccagtatatcgtatacttttatatcctcaggcaagccgtcagatgccttttcacctttgctcccaaaccacatatatgcaatctgaaggattttctttcccaattcatcaacccgaaagccctccatccgtttctcaatggattctatattcattttttctttccacatcctgtgaaacacatacaaatccaatacattgcgaattaaaagcgcatctgttacatatgcgtaagccgcgcttgccagcatatacacaaattgattttcaagtgaaaagcccctcacatatttatatctgccccaaaaaggcgcggtctccagcataagcttcatatttttatcatacagcctggtgcgtaaaggcagcttataataaatctccatatcaaagccggctgcattcttcatatgttctccatatcccttataagaataatctgtctcataccccaaatccaccatataccccttggccagcacataactcttttcatccaccaaaagtttaagcagaccgcaggccgccatctccggaaccgggtataattcacggatagcacaggaagaaataacaaaacagggaagattcatcatttccatcatcatcaaaatttcctgctgagcctccctgtacacatccccaaacctcagtgccttctgataacgttcaaaaaatcgttccctccaccgctccggtatttcgtcgccttttcccaatgaagctaaatatatgatattggcaattttatggtaatccgcttcccgaaacattttttcccaatttaccctgccgtacatttcccgcaaatcatcctgacgcataatcccgcctactgtattgacaagaaaacggccttcgtagattaatcgttccataaaaatctcctattattgaactaagtaaacttccttcctctgccttccgaatctaaccgcctcctcatgggtatcaaaataaatgtcaatcacattgcctgtcacactctcccctgtatcctctactgtatagacaatcccaccgatttccacttttgtacccatttccagaatgcttggatctgccgccacagtatatccggctcttggtatggtctctgtttttgttaaatatttctccttctttccgcagcacacttcacaaccgcagtaaccggtgatatcaaatacccctaacagcatcccttcatgtgtttccttctggtgaatcttatataccggaagccttgctcttccaaaggccagggctgcctcatggctgtcaaaatacagactcagggtttctctggccctggccgacagcttatcctgtacttcgtatacatgtcctccaatccttaacctatctcctatctggaaaacttcaagattggcagccacagtaatcccctgcgcaggcctctgcccggaataggtaagatagccgtcggacttctttatacagatttcgcagctgcagtaagcagctatctccatctctcccaggtattcttctgtttcttcttcctcagctatcaaagaagcgcccccttggcgttcacccgaaacggatgcgattacatctttctctaatggtacaattgctgttaaatcctctcctgccgtttccgtatcgccattactggtaaccacagctgccagaacacttattacaattaccgctactcccacactgcattgaataccagtcaaaaaccgtgattttatgccaaaacgttttttcaacattggggtcactctcctggaactcttctttatcttatgtattacttctgtgctgccctgaccgggcagccccatgcacggtttacttcagcttataaaccgtgtctcggcttttccttgacctgcaggcaggctttcagaatctcagtgaaaatcctgactttaaatttattttcatagaatcctatcattggagccaccgaatcctcatgagccacaacatatttggacggaagcctggttaaaatcaatgcttttacatctgcgcagcagcggctgcacatgcacacaccgtactgctccatatatttttttaaatccatacgcgtaatgatattttccataacattttcaatgtggcatgcctcctgttcggaatcctggcccccgtccagcggttcctgacctccgctctgatattcctgagccctgtcctgcgcttcctggttctccaactgctttgccaaatcatcaaaaatcctgtttgagatattctcctcctgatcatccaccacaactaccatcttatctcccgaggaagataccttttgcacggattccatgggggctgcttccgtccccgccttttcctgctttttagtgtttctttctccggacaaatcctgtccggaaatttcctccgggtctgcgccattggtaagcaggctcaatacatgagatgtcttattcgttttctttggcatatcccgccgcctcctttaagtgaatcctctctgcaatctcatcaatcaactcctgataatcttttaccgctgctgaacggggattataatcaaaaatgctttccccatgggccggcgcttcagcaattgcaaccccgcttcgtattttcgtgccaaatacagttgttttcatctgcctggccagctgctgcgccatttccagcacatcccttgaaagaagcgtccgcctgttaaaacgggttaataaaatccccagcacatttaattcagggttcagattttcctgcacggattctatggtttcctttaattgtgacagccccaccagactaaggatatcggacgccatgggaatgattaaaaaatcagataccacataagcattcactgtgaggaggttcagcgccggcggtgtatcgataataatataatcgtatttctccattacgggcatcaggacatcgcgcataagatattcttttcttccggaattcccctgctccaggccgctgctgctgagtgtaatatccgagggaaggatatcacagtattctgtccgtataatggcttcctgtattggaagctttccttttaaggcatccagcactgtggacatatcagaggagccaagcccaaggcagaaacccagatttccctggggatccaaatcaatccccagcacccgcctgcccctggaagatattcctgtagccaacgcggctgaggtagtggtttttccgacaccgcctttctgattagaaacagttatgataatagccaaaatatttcctccctattctttcgtgtatgttcatatcaaaataaccggactgttttcaaatacattttaacgctgccacagggcaagctcattctcagaaggactgcaatccaccttccgttttatattctcctcatttaccggcagcaggtattcagaaaacggcgccccagcctgggtctgcgccatttcagccacttcctcccattcctctgcatccgcctcatccccgttaacataatacacaagctctccccagtcatcctgttccagctccaggctccatatattctcaaaatcgcagctcccttccctcagggaaaaataatttcttcccccattgtcctccacgattgtaagataggttaattgttgttccgcattataggtgaggaaggattgctccgccgcatcgggatccgactttgatgagacggccagttcttcatcctcgggcatccacactgctaccagcaaaacacgtttagatgatattgcattgtcaaataccgcaatatccctgtatccgtccccgtttaaatccgccagcagaaaaccgggctgtaccatatcggccgcctttttatcaacaaatgtcttcagctgctttgataccttcctgcggtaagtgtcaaactcctccagtatgactccttccggccccacataatggttatccggggtaaagatattaaaacatttcgctccgtcttcccccatgtaatagcgctgcttgtctttcctgtcagttacccatcctgtgcgcatgtatccattggaatccacataatattcctttccctggtcctcaatccattggtccacagcaggttctccgggagaatacatgtatttccaccgttttccatcctcctgaagttcccaggtcccctttgcggccagggaatggaagggggagagcagggaaaaagcagccacagctggcagcatccggaatatggtgcgcttccccttctccgtattcatactaccctcttgcttttgcccttgtctcttcatattctttcagaagcttatccatcagcgccaccagacggccgatttccggttttgccagctggtcatcggctcccagttcctttccctttctccgcatctggtcgtcaatcagggatgaaaagatgatgacgggaatcttcttaagcctggaatcatccttaataagctttgtgagacggtgcccgtccatctggggcatctcaatatctgttattataagcttgactttttcatataaatcgggttcatcctttatggatgacagataatcccaggcctcctttccatttccaaaattatgtatgttggtaaagcctgcccgttccagtgaatcgtcaatcattttcctgagcagaacagaatcttccgcaatcacaatgggcgcctcgttcaaaggccggtcccccatggcatctacctctgaaacctgaatggtggtttccggggcaagctccgccacgattttctcaaaatccagaatagtaaccagctggccgtcgcactgggcaatccctgtggctatgctttcatccccattggctatggtcttatccggtttctggatatctccccaggatatgcggctgattccctcaatcccctgaacccggaacgccacagtcattttattaaagttggtcacaataaataaatccctggcccctttttccacctgcgctcctgaaagatagcatgccaggtcaatcactgtaatcagcgtatcccttggtttaaagattccctctacggacggattagcatggggcatggattttaccttttgactcatcataatttccttgacctttgccacattaatgccgtaaaactcatcctggattgtaaatttcatgatttcaatttcatttgttccggattcaagcaaaattccttccttttcccttttcatcagttacctcctctataaatgccgctcaggctttcccattgtgcggattgcaacatcaccgctttcaatatccaatatcatggtccttgcaaaggcgccgccggtatcctctgccgaaatcctcatattctcttcctgcagtatcttttttaccataaaagtattcctggagccaatatttccaaactccgcatttccccggatttcaaacatcttcgcgcctccggcgattttaaccacggttctggattttaccatgccgaaagcgcttaatttccggattgtctcatggataccggaatcagcgtatttataaatattcccctcctccgcgtcatgacgttcaggaagcataatatgaagaagagcccccagatgtaaaaaggggtcccaaaacgagattccaatgcaggagcccagagcatatgtaatgattttcccggtgcctctggtaaatttcatatctccaattcctaccctcagttccctctcctgcattataagactcctaacttctctaaaatatcatttaaagacttcatatcaggaagcattaaaagccagtctgaaagccgcgtttcatccataataaaatccgagttaaaatacatcagtttatctgtctcatatccgtactccgccataggaaccgtcaatatgccgcccagcatattcacggtggagctgggcactgaaagccgtatatccattttcaccagctgggcaaaggcatttatataagaacagatcgcgatgtttcccacctcttccaatgcggaataagccagatcgtccagttcttcaaaactggagaaacgttttcccagaagcttttccaacagcgtattggcaaactccatgttaaacagaaaaagcatcagcccttccacgtccccgctcattttaaccagggtcgctgctacgatttcttcaatattgccaattcggttcaccgcgtcctcatatcccaggacattgacctgtggaagggtaatgcgtatttccttttgaagaagtttggaaagagccgtggccgcatggctggtgccaatactgctgatttcccgcatcacatccagttcctgcagcttcagctccccgtaatcattaatcttcatgtccattccacctttaccgtttattcatcatcattccctatccccgcagagagttaatggtcccctcaatttcatctgatgtaattaccatgcgcagtgcataggaaaatgcccgctggcattcgattagtctggtcatttctttggccatatctgttcccgatgcttccagggccccctgcgccagggccggtttttctatcaggaccgcttccacgcccccgtccctgggaacatactcctggctgcccgtgctcacaagcctgctgggattctgaaacgtatatagactgacctttggcttctcgtcctcgtccgttacatcctcatccctctcatacccttcttccatctccgcccgcagctcttccacatccatcacttccagtttgagcggctggctgttttggtccaaaaccagctttccggaatctgtcatcagataaaagccatcctcccgctccgcccgatgaaagtgtccgtttctggtataactgactgcccctgttcccgggtcctggaccttaaaaaatgcgttgggctctaaaattgcgtaatcatactgctccccggtctgagtaattcccgcgctgtcaaaactggtatatgtcctttcaacacgtgaaccggctcctgcctgcagttgtgtcacaacgccagtggaatcattgagattgtagttaatcagatcggaaaaaacagctgtcttaggcttaaatccattgttatttacattggcaagattatttgcaatgacgctgagcttttccgtacagcttccggcgccaacagctcccacataaaatgactggttcatattccttcctccttatacccttcctacgtcagatgcagattttcccataatctgatcatacattcttaatacctgagccgcgctctgaagcgctctttgggaagacatcattgcagtcatttcatccaccatgtcaacgtttgatttctcaagcgtcttccagagaatttgcgtttcttccccacttacctgcgcccctgcctggtttgcggagaacagcccgttatcctccttatgaagctgtccgtaatccccaaagtccactatttgaagcgtccccagattcacctgttccgcgcttccatccgtctgttcagaggctgtaatgcgccctttatcatccactgtgaaattttcattctgaatccgaatgggctggccgccggctgagagcaccctgccgttttcccccagtacaagatatccttcagaatccacggcaaaggaaccgtttctggtatactgaatcccatttggcgtctgtatacagaaaaacccctttcctccaattgcaaaatcatagatgccctccgtaggctcatagcttccctgctcataattcacataggtcctggaagctgtacgaatctttgatgtggaggccagaggttcagccgttcctttatcgcgccttccggtacggtaaagcatctcctcctgaaaggtgctggaaaccattttatcccgcttataaccagcggtttgaaggtttaccatattattgctgataacatttaagttccggctctgggtaagcattccagaagccagattataaaaaccctgatacatttttgcttcatcctcctttttattatccaagatgtgatttcatgtatgctttcagctttcgaatcgcctcgctgtggatttgggaaatccttggctcgctcacatttaagacctgagccacctgcgtcatgctcaattcctctacataataaagagagataaccagcttttccttttctttcagcttttcaactgccttaaccagtgtttttaccgtttctcccttaaaaaaaatgtcctccggctgtccctcgatatcatcgctcggcacctgaatcgcctgcccgttttcatccccccgtgtaatcatatccaatgaaagtacattcatcatggtgctcatcctctgaatccgctgatattttcttagattcatcttcaaataccctgctatctcttcatcggaaggtatatgcccctgcttttcatacaaatactgccttgcattttcaatagactgacggttcttgtgataatttcttggtatccagttatttttgcggataagatctatcactgttccccgtatgcgccgcgaaataaatgtctcaaatttactgtcccgctccggatcatatcggtcaatacctttcataattgcaataaccccctcatgaatgatatcttccatctgcataaaatcagagtacagattgttcatttgaattgccacagactttgccaggtaaagataccggagtgttaattcctgttttattccctggtccctgctctcctggtaaaggacaagcagctcctcatttgtcatttcttccattcccttttgcatcataatcaccttcgctatcatcacatatgattcctggtctcctccagtctaaggctgccgattgattgtatctgcacattgtttgcaatctcattaaatgacagaacacgcactttcggatagaactgctcaattaaatggtaaaaatgtatccgcattacctgtgaggtcagaataaccgggttttgtgtaaggccattaaattttttcatctgttcagccaactggcttataagactttggagaatatccggctgcagggccagatacattccgctctcacctttctgtacagagcctgccatggtgcgttccagctccgtatccagggtaatgactttcatgcttccatcctcgcagtacagtctggtaatcgtccgtttcagcgctatccgtatctgctcaataattccgtcaaaatccctgccgggaagacctgcctcagatatggtttctatcatggtttctatgatggtctccaggtctttgaccggcaccccctcttttaagagagccgtgagcacacgctgaaacagattataggagataaggcccgggaaggcttcctccaccagttccggagaagtctttttcacattctcgattaagcggattacttcctgtcttgtaacgagctcaaaggcgtgctgccgtatgatttctgaaagatgcgtaaccataacggaaagagggtcaatgaccgtatatccgtacagttccgcccgttccctgtcctccggccttatccagcggctgggaatcccgtaagccggctcaatcgcctcaattccatccacctctttttccgggtgttccggttccagagccaggtaataatccaccaaaagctcgcctcttgccacctcttctccctttatcttgatgcagtattggttggtgctaagccctgagctgtccctgagccggatggatggtatcacaaaccccatatcctgcgcatattgtctgcggaatatgacaatcctgctgataagccttcctcccactgattcatcagccagtggaataaggctgtatccaaattccatttctatgggctccaccgtcaatagtgtgtaaacattattgacatccttgaaatactcgtcctctgcaacagcattagacgccgcggcttctgcctgggatccctgaaccgcctcggaatcctgatagagcaccgctcccggagcataggaggcttccgccacttttctggacagataatatccccctgatattaaagccgcggagataataagcagctgcagtacaggcatccccgggataaaagtcaagaccgccattaccacaccgctcatcataatggcatagggctgtgacataaactgtctggagatatcctcattcagactgccgtcagagacagctcttgttacaatcattcccgttgaaacagatatgagcaaagccgggatctgggacaccagtccatcccccacggttgcaatagaatatgtatttaataccgttccaatgctgcttcctgactgaaggatgcctatgacgcttcccccgattaagttaatcgccgttgtaatcagggacatgacggcgtctcccttaactatctttgtggcgccgtccattgcgccataaaagtccgcctctctctgaaccttttgtctgcgatcctttgcctgctgctcgttaataaggccggagctcaaatccgcatcaatggccatctgtttccccggcatggcatccaggttaaatctggccgctacctctgcaacgcgctcagctccttttgtaatgacaataaactgcattaagacaataataaggaaaatgataaaacccactaccacatttccacgaaggataaaatcaccaaaggcttttataatctggcctgaggaacctccattggaaagaatgttccgggttgtagaaacattgatgccaagcctgaaaagagtggttaccagaagaagggatggaaaaattgaaagttccaggggttcccggattgtcatggtagacaccagaatcatcatggaaagagccatatttaatatgattgcaacatccaccattccggccggcagcggtataattaataaaagtatgatggtcagcacaaacagcacaaccgagtaattaagtatctttttcatgaaactaactccatcctggttttattggaacatgtcttccctgtggctggccctgtagatatatataagtatctctgctaccgcgccgtagaactccgcgggaatctcctggtccagcctgcaggaagcatataaggctcttgccaggggtttattttcaatcataaaaaccccgttttcctctcctgcttttacaatgcgcagcgccagctcatcctggccttttgccaataccaccggcgccccatggcgctttgggtcatatttcagagccactgcaaaatgcgtggggttccttacaatcacgtcagcctccggaaccttctgtatcatcctgctaagggccatctgtctctgaatcctgcgtatgcgcccttttatttcaggattcccttccgtctgcttatattcatccttaacttcctgcttggtcattttcagattcttctcatactcccatctctgatacagaaaatcaaaaaatgccacaattataaataccatacagaccttgagaattaactgaaacgccatttgaagcaaatggatacatgaattcaggggctccacatcaatcatccgggccacctgtacgatatcacctttaatcaggttaaaaagcaggactcccagtaccgctattttaagcaggttcttcagcagctccaccgcatttcttacagcaaacattttttttattccactgataggattaagcctgtcaaatttaggctttaatgttttaaatgatatattaaaacgcgtctggaccccatgagccgcaattcccaaagccatggaggaaaggagcagaggaaggctgcattttaaaaatgtaattgctgtggctgcaaaaagcctgtatgccaggacagactcctgttccaggctgatactgtcaatcacaaacttcatataatcccgtacattgcggtatataaacggcatcagcagccgcatcacaaaaaaaatccccaaaagcattacaaccgtggcaatatccttgctctggaatacatttccttcttttctggcatctttacggcgtttactggtaggttgctcggtcttttcctgtccgccgttatccgccacccttcaccactcccttctccggacaattacctcatcatcagtgccagcctccaaagtgaccggaacatggtatctattatcacgttcagcttatccgacatgggactgaataaaaacatcagcatcaaaattcctacaataatcttcatctgaaaattgataacaaacacattaatatggggaatcatacgcataataatccccactgccacttccgctaccaattccattgcaataagaggcattgcatactgaagccccatcagaatgctgtcctggaatattttcaaaaccgcttccgacagctccggccttattgacacagaaccaaagggtatgaaacgggcggcggcgaaaaaaatcccaaacagctttaaatggccgtcaactgcaaaaaaaagcagcatcaaaaatgcgtaatacaatcctgatgtaattgtcatctgggagttgtactgagggtcgtaaatctgcgccatgttaagccccatcatataatccatgacagacgaggcaaaacggaccaccagaacgcataattctattccaaatcctaaaacaaacccaaataacagctctgacgccagcatcacaccgtattctatcagactggagggttcgcgtcccagaccctgtcccatacctgcgtaaagcataagcgaacatacaaacacaaaagcggcttttgcagaagatgggaaattgttccttccaaatatgggatttaaagcaattgccccgctcatccgcatgacgatcaaggaaaataatataaacatcccttatcatcctccggctattatttcaaaaatcgtcctgataaaatcctggagcattaccagcatggaactgcccaacactccaagaagccctaaaatagccagtaactttggaacaaacgtaatcgtctgttcattaatctgcgttgctgcctgaaaaatagcaacaagcacgccaactgccatgctgatgatcaaaaagggcagcgacagcctcatcatcagctgtaatgcctgatacattacatccaatacctggacgttgctcataattacctcccatccggcctgcttagcggaagcttctcacaatactggaaaacagcagttcccatccgttaacagttacaaacagcaaaagtttaaagggcaatgaaaccattgtgggaggcagcatgaccatccccatagacataagcgttgtggcaaccacaacatcaatcaggagaaacggcaggtaaataagaaagcctgccataaatccgcgcttcagttcactggtcataaaagcaggcgtcactatggtcattggataatccgttacatcctcccttatctctgttccggacatttccacaaaatgatctaatgtttccttttccgtgttgcgcaacatgaattctttcattggaacagacatttgagccacagcctcctcctgcgtaagctctccccgcagatagggctgatatgcggtctcattgatttgtcctataacaggccccataatataaagggtcaaaaacaaagaaatcccggctaacaccagattgggcggggtctgctgaatccccattgcatttctggtgaaagaaaggataatgatggttcttgtaaaagaagtcatcatgactacaatggagggaagcagcgccactaatgtaatcataaaaatcaattccagagccggtacattgcctccattaagccctgtcagaagattatccattttcttcctcctgttcctttcctatacgggcttcatattctcctttaaaatcctctcccaattcagccagcatctgaatccctgcctgactgactccaatcagaaacactctctccctcatcttcataagaagaagacgctggtctgtccccagacgtatttgttcaagaatccttatattttggtctgaagacgctttcatataacggctgcccagctgccggctgaaccaccaggccagcagcagcacaagaaccaccataaatatggcgctgaataatgaaaaaagttccataactataaaatctccgggtttaaattcctggcaatgatttcagtgatacggatgccaaaattgtcttccaccacaacaatgtctcctcgggcaacgcactggccattgacatatagatcagcctgctctcctgccattttgtccagcactaccagggagccctgggtcaattccagaatatccttgaccagcttttttgtccggccaatctccacggatatttccaatggaaccttcatcagcatttcctggtttacggtctcctcctctccgtttaaggcgcctgcctccagcggcttatttttggcaggatgaatcagcgtgctttcccggcttcccttttccttcatatccttcatcagttccaacatctgcatctgagactgctgcatctggtttatcagctgcagcatccctgaatccaccggcattgactgatatccgggagttaccgtaaaagcggagggtgatactgccggctgcggctgtaacactggctgtgccgatggctgcggctctgccattggctgtggctccgccattggctgtggctccgccattggctgtggctccgccattggctgctgctctgccattggctgctgctcctgtaccggctgctcctgccgttttgctgacagctcttttgtctcttttgctgaatccggttcctgaattgccccgctatcttctggttccgccgcgatttggctttcattttctttcaggctttccgtaaaaggctcaatcaaatgctttaccaaatcagtggacataatattcaaaaattcatttttcagctttccttctatttcaagcaggaaatgtaccactaccatcttttcgccctggggaaagaatcgctctttaaaccactcttcactttccacaggaaaagataccggcgtggatatattaacggcatagccaaagaactcggaaagcgcagttgcggatgaccccatcatctggttcataacctcgcatattgcactcatattaatctcattcagttcaaattcctctgccgttatctccgcccccatgagcatccctacgataatacggacatcattaagggcaaacatcataacattattgcccgttaatccttctacataggcaatctcgaccccaaccgccggttccagttttttaaaatcaaactcgtctctcattaatacccggacagtaggagtggtaatatttaccgtttcgccaagcattttagatacggctgttgccgatgcccccagactgatattcattatctcgcctatggcatccagttccatttccgtaaaatcacaagcgcccattgtttgtctccttttgctctttcattttcttgccatacctctatttccctatatccagcgctttctgagccataaccttcattgcatttaatgccgtcacatttgcctcgtaggatctggtagccgacatgctgtccactgtttccttcaataaatccacgtttggataattcacatatccctgtgcatctgcatccgggtgtcccggattgtagacccgcttcagctctctgtcatcctcaataatacctgccaccctcacccctgcattcctgcttaaaaatcccttgcccagggaagcattgcgcaaagcctcccggaaggacccggccccgtagctctcaaacagcacatcttttcttctgtaaggccctcctgcctctgtccgcgtagtgtcaatattagctatattttccgctgcaatatccatccggagtctctgagcgctcataccggaggcggcaatatcaaaggaacttaaaaacgccatctgtatccctccctattttccaaaaatggaattgactgtctggacaatcctgtctgcattaaagggctttacgataaaatcctttgctccggattttatggcatccaccaccatactttcctgtcccattgcagtacacataacaacctttgcagacgaatccccctccttgattttcttaagggcctggaggccatccatattgggcatggtaatgtccatgataaccagatccggcttttcctcctcatactttttcactgcttccgccccatcctgcgcctccacaaaattactgtaaccgctctttgtcaaagcattttttatcatcatccgcatgaacgcagcatcatcaaccaacataattttctccatcttcttatcctcgctttaatttatattttcctgcctaagatgccctttattttccccgtcttcagcttcctcataaatctgtttttcaatgcagacagctatgttcttcttataggcccccatctttccggtaaaccagggctggcggcccacaaaaatctttacatttccatccttgggtttattcatggaaatgacatctcccactttcaggttataaagggtctccagctccagttccacagtgcccagctgccctgttacagggagcgctgtatagcgcaggttatccatgattacttctctgttgtcctcataggaatagcctctggcaatatgcttgcggctgtcaatcagatggaacatgaactccagcagcgtgcctggaatgcatatttttatcttttctaccgccatgcctgccacatccacattgagaagtataatcgccacagtctcatcaagaccgatttcctgaatcatgcttgggttttcttcaattctttgtacctcaaaactggcattgatataattggaaaagccgtcttttaacgcctgcacaaaatacttcaccactctccggtataatgccacttccacatcagaataatggtaattttcttccagcttcacgatttcatctccgccgcccagcatgtggttaatcagtgtgatgaccaatccgggagtaacatacatcatgagcggaacattattctttcccttgtcagaaatctcaacatccgccaatgtaatactgtcattttcatgaagtgaattgacgaactcatagtatctgcgctcctgcacttccatcacggttatgtctgtaagaaccctgaatattccgtttacctgagaagtcagaatacgggcataattttcaaagacgctgttcagtatttttattttgtcctttgtaaactttcttggactgtagaaatcatatttactgtactttgtctcttcggcctccagcttcttttcaactgattgttccatcttttcaggaccatcactctgcattgacttaagaagcgcatctatctggctttgggatagtacatctgccattgctgaaaccacctttactcttttattctgatgtctccccgcctgcaggagccactgtgcctgagggcggcattgtgctggctatattctcaggcgagggctgtgtctgtgtaaacccagagtcagcgttcccgttctggctgcctgtcacaacggtcttgtctgcattctttccgctgttatactcttcaatatattcgcttatggaacgctcggccgtgccctcatcaatcagcagcatctcaaccctgcggttttttgcccttccctccgaggtgtcattggaagccaccggcctgaactctccatagctgatattgactaatttatccggtccgattacattcttttcctgtataaagatacacacctccgccccccgcatggctgacagcatgcggtctacacgcggattgttaagccgcctggggtccccctgagccgtatgggccataatattaatctgggacagcttatcactcatcgggctgattgccgagcagaaggcagccagaatcctttggccggattccgttatagcagactcatttccgttaaagaacacattgtcgttaaagcttacgtatgtgtatccgtcccctcttgaaattgtcacgccctcagccccattctcattcattctctgggcaatggtcagatagagcttatttaaatcttccgcgtcacccgtggtgagttcatccggcttcatcccctctaccgctgcatcagggtcaatgattccgccaacgtcaatttgctcctgagcttccttcacatcctcaggatatatactgcggacaaagatttcccatttctgttcgcttaaactggacatggaatagagcatgataaaaaatgtcaacagcagggtaaccatgtcgccgtatgtatccatccagtttccgcccccgtctgtgggacggttccctttctttttcttcattgttactcacctgcctctggattgggggccttttctgcttttgccagcagcttgcgctgaacggattgtttcgtggaagccagaaggtgctcccgcagatattttggattttcccctgcctgtatggcaataatcccctcaataatggtggagcagtaaagctcctcttcatcattgcggatacgcagttttttagcaattggatggaaaaacagattggagagaagacttccgtaaaaggtagtaataagagctaccgacatatcctgccccaggttggaagcccctccgcttccatccagattaaggcccttcagcatgttaatcagtcccaccagggtacccaccattccaaaagccggagcataggcagacgccttttcatacagcccggccgcggcgtcatggcggaccatcatgttttccagttcccgctccagcacaaaacggaccttatccggatcattggcgtcaacaatcatcagcacactctgtttaaaaaacggatttttgatttcctccgccttctcttccaaagccagcaggccattctgccgcgccaccatggccagatccaccatctgctccaccagtgccggaatattatatttttttccccggaacaatattaaaatatgttttggtatatccagcaggattgatagaggatagctggcaatggtggcggcaagggtgcctcccaccacaatcaggatactgggtatatccacaaaatttccaatcttatccagtccaattccgttgataaccagaaaaataccgcatacgattcctattaatgttgtcaaatccatacgaaaatgcctcctgtatcactgcaaaagatgtaggcagcaatccctcataacttcttttacctgctgggtaatggattctgcgctgtccttcacaagataaaacgtcccattcatcatcttaatctttgtctcaggtatcatttccacggattcaatctggaagaaattaagtaaaagtgcctcaccattcaaacggattactgtaatcataatattctcttttcgcccttatcctcccagggccgccgtcagacagccccggaaagagaatttattatcgtttcatactaatcaggtctgataatatctcatcactgacagtaatcatcttagtatttgcctggaatcccctctgtgtcgtaatcatttccgaaaactcctttgccagatccacattggatgcctccaggtaaccggtcatcaatttggatgtggaaccgcctgggatggttgcggaacaaaagcccgtattatcgccaatgcttgcggagtaataggttcctccgcttttcataaggccttcctgattttgaaaggttacaatggctatcttccccaaagatacctggacgctttcgccattgtccgggttcgtaacagtggctgtaacctctcccagttcattgattttcacactggctgcctgaagcgcatcatcatcaaacccattgttcaaatcagaggggaccctgagcgccactaaactgcctgtctcaaaccccttattgccgtccgggcggaatccgtatataaaattcgttccatcggtaaggtatccctgactgtcaagctggaactgccccacacgtgtataggcaaattccgcttcctttaatgcatctgtcacatcagcagcatccccgtctacatcaatctcttttgttgatatagcctgggttgcaaaaaaaccctgaccattaatacatgcgttcagtcctcccacataggtaggtgtgctggaaagcatatctgtactgatggaacccatcatactgccgtatccatactgggctccgtttgtaccggccgccgttgtgttgccatcttgaactccgcctgttgactgggtggctgtctgatacatggcctccttaaaactatagctctgagccttaaacccaaaggtattcacattggcaatgttgtgtccgattacatccagtttgttctgatgtgcccgcagccctgatactgctgaatccattgctcttaacattttttatcttcctttccgctgtctccactgttgcacttccggcactttgccaggcatcctttcggtcctgcctattttgaaatgagaacagcactgtcaatatttgtaaaaattctgtccttcatatcctctttggacatgactgtaaccactacattattaggtacatttacaacaaaaaccgcctggcttccaataaccgccaaatccttagccccctttttccgggcctcttctaccgcatgttccagaacattcttaaactgtccgtctgttgtaatcccccgctctatactccgctttgcggcatgtttggaaaagttcaggccttctactgcttttatctccatattttctttttcctctacaccagaaactgaaccttctcttcctctcccttatctgttcctccaaagggattatcaatctttcccattcccactatataagaaagagaataatctgtgctgtcacccgcaagcctgatggcggggtttcctcccactaaactcacggactcaacgattccatatttcacacccacggccaccggctgtccatattcattttcttctgttacggcaactgtaatctcctgtcccaccagcccggctgcgtaggtctgtgttgtaatgttcatagaattatttacagcgtctgtcattgtgccaatagactggaccattgccatctgcgtcatctgcgccatcatctcgctgttgctcatgggatttgtcatatcctgattctgaagctgcgcagccagcagcttgaagtagctttcgattgtcagcgtattcttctcattggaagatgctgaataagtttgcgttatgtatgggttatttgtgccgcttacccctaaactatcagccatttttcctccttctcagaccagccccagtctgacctgttgtataaaagactcggactgttgtttttttctgtctttttgctgcttttgttcccggccctctgacccgcgttctctcccggattcctcaggataggcttcctgctgtggtatgtaaacaactgtctcctggccggttttttcctcaatcattcctgcaatgctgcccgcatcccggctcaggatttcaagtgtcctgggattagcggacataagcgccactgatgccctgtctgcatcgtaggtcacacggacaataattctgccaaggctcgccggttccagttcaatggttatctccccatttttctgcggcatcctgttggcaatggtttttccaacatcagccggaagttcctgccgggtcgttctgattgtctcaacatgtctgacctcctgatgtacggccccctctgcccctttgccgccttccgccgcggatgcaaaatgtgcttgttccggagcttcattctccatctcctgccccggccggccggcttctttctctttcgaaccaatctcagctatttttccatctgcctggctggacggttcatctgcctgtggtttggagccttccttcaaatccccggccttttcctgccgcagcgcatgggaatcctgccctgccccggtctttttaagtttttctgtcccatccatgggaagtcccatatcagccattgtctttgacccctttgtttcctgttccgcctgaagcattttccggggggcggcagtttcctccgggattgtccggctttctgcgattatcctggccgtattttctccttccgcaatcccgctttgctgcgccttcacaaattccaaatccgggactgcttcaccctgttccaaaagcagctctccacacaccggaatagattggctcataccccattcaaaccttgccgcaaaatcatggtacagtttcagggtctggaaatcatcagcgtccggctcctcctttggttttgtttgcccgccgtcctccttttcccggactttcccatccggccgcggcaatccggcatccctcacatctgcagcctttgcgctgagcatgtgggaaaaatccgcattattccttccggatggctttgatggattggacagcttcttatcctgccttatcatccgcaccatctcaatattggccataagcgtttcctcctcattattatttttataatcaacagctgctgctgcaattatcagtcttatccccggtgctggctgcggtttagcaccgcgctccggattacaaattcttcggagaaccgttcttccgctctcatcagctctttattatatgcggtctggcgcctgtccttcagcttctcaaatttagaggtgtctatcttagccgccacaacctccttttttttgcattcttcctttacccttaaatcctcaagccttccctcttcttcctccaggatttttcccatccgttcaatgcacatatcatacaggcggtaatattcaattaaggcctcggaaccctttgtacggtcaaatgcatcttcataaccgctcaggctgctgtgggcgcggattacctcttcctcctgacggatgacttttctgttaatggcagcatgttctgtttttaaatgttccaatgtctgcatcttataatcaaggaccgtatccaggccaaaccggaactgcttcatgtcattgtctcctatccggtaatttctttcaataatgccaatacctcatggtattcaaagctttcatcaatgtcctgctccaggaactggttcatgcggtcaattttagaaaccgcctcgtctaaggctccgttgcttccttttttatatgcgccgattgagataaggtctgcgtttttctgatacagccccatcatattccggaaacgggaggccaaaatcctgtgttcctttgaaactacctctaccattaatcttgaaatactggctccaatgtcaatggcgggaaaatggttctcacttgcaagctgccggctgagcacgatatggccgtccagaatcccccggaccgtgtcggaaatcggttcgtttgtatcatcgccctccaccagcaccgtgtatacccctgttatggagccctgattaaaattcccgctccgctccaaaagctttggaagctcggcatagatagagggcgtatagcccctggcaataggcggttccccgatggcaagcccaacttcccgctgggccatggcatagcgggtaagggagtccatcatcaaaagcacgtcatttcccctgtccctgaaatactccgctattgtagttgcgaccaaggggcatttcattctgagcatggcgggctggtccgatgttgccaccactaaaacagaccggttcattccctcttctcccaagtccttttgcacaaactccaggacctcccgcccccgctcccccaccagcgcaatcacattaatgtcggcctttacatttttagcaatcattcccatcaatgtgctttttcccacgcctgaacctgcaaaaatccctattctctggccctttccaatggtattaagtccatcaatcgccttgactccaaactccagacgttcccggatcggcggccggcttaagggatttgtataggaactgttgaccgtataaaactgggttggctgaaattcctcttttccgtccaagggttctcccagggcattgataatcctgccccgcaggaaatttcccaccggcaccttaagcctgcgccttgtgttgcgcacaaagcttccggaggttatcccactggtgggttcataggtcataagctggatttttccatctttaaagccaacaacctctgccggcacctgacggttctgctcttcgttataaatcattacaatatctccgataccggaccggccgcctgatgcttctatggacatccctaccacattttcaattttcccaatatggcttacaacctccgccttagccaccatctgaggtattttcttaaacataagcgctcctaaactttgatgttttccagcaattcccttatattatccatctgggtatccacactgatatccacgatttcttccggcatttcaatgatgcagcttccattgctttctttattcatgactataaatttgatattgtccgacagcctggccagttcatttacaacgtccgcgtccgcctccatcatcatattgtaatcgcttttctccatgtatatttttacccatgcggtccgtttcagtttttctatttctgaaacaagcattctcttgataatctggccgctggatttaagactgacgcaaatcactttttccgccacggcaagagagcagtcttttaattcatcaaggtatttctcaagacttctttccttggcagcatcaatggcgctgagggcgttctccaggctgctgcgaaacacgtcctgctgcgcgctcatcaccttgctgcttttttccatgctctctttccggccctgctcatatccctccctgtatccctcttccctgcccttggaggcggattccctctttaccctgtctgcgttttcccttgcttttgcaagaatttcttcagcctgcgcatttgcttccatgaggatttgccgggcatccgcttttgcttcctctatgattgctcctgcctcatcaagggccatgcaggccgccgcctcctgcggctcctggcaaggaagatggaccgcttctgtctttgtccccttttcctttactgatttttttgctggaaaagacatctggacaggaaaagaaaaggcttcgaccttcgcctcccccggctttacaatgcctttaaacgatgatgttatcatcctcgcctcccttctttataatgacctctcctgcttcttccaggcttcggataatattgacaatacgctgctgtgcctcctcaacatccttaagccttacattggtggtaacctccaaatctccctttacagtctcagccatacgcttggacatattggcaaagaatacctgcttcatctcatccggagcgctcttaagggcatacacaatatcctttgtatcgcagtcacggacaaagcgctgaatggacctgtcatccatatccagaatgttctcaaatacaaacatcctggacctgatattctgtgacagatcaggattatgtttatccatctcatcaaaaatacgtctttcactgcttctgtccacattgttcataacatctgccacaaagtcgattccgccaagattcatattgtcctcgctggtgataatagttgcaaacttacgcttcatctcctcctcaacaatggcaatggcctccggggataccctgtccatattagccattttctccaaaatcggaatccgctttttatccggaagctgctccagtaccagagcagcctgcttgggatccatataagccataataagggcgattacctggggacgttcatgctgcagcaaagacagcagcgctttcggatctcctttcatgaaaaaattaaagggtttggactgcaaggttctggaaactttttccaaaagacttctggctgctgtttccccaaatgccttttcaagtacatttctggcataatccagtcctccgtctgacatcatcttgtgggtcagacacagtttatagaattcatccagggaattttccacctgactgttggaggtttttcccatcttcgccacttcataggtcaggtcctcaatatcctgctcgctgagatacttgtaaatctgcgaagcccggtccgctcccagggacacgaccacaatggcagctttttgcctggtatcagtaatgatatctgtctcatttttcttttcttcttgtatcactgccttttctgccaatgtcctcgacctctcctctcagccaactctgcactaattttgcggcaatctgcggattctgatccacaaaatcaccgatattctgtttcagcttcatactatgctgcatgcgaaggttgatgatttcttcgttcctgcgcatctcatcatcctgtgcggctacccccgcttcagctgcttccccatcagctattccgggcgactttccagccacaaactcctcctctgtattttccacaaggtcgaacagcccgtccatgtccgcatccccggcttttgccttcttcctgcccctgccgcggattatgagcaaaagaatcagcagcacaagcagcactatgcctgaaataattgcaatcaccaccggcaaaggaagattcaaagcctgatccggctgggcgctcaccggctgggcttccgtatcaggagaccggaccacgccggaggctgccgcacgcacgattgcgatgttctgctccgccgcatcctggggaatgcctgcggagttagcaaccagctttacaaggtcattctggcttacggacatatcatccgtattaatcacaattcccaccgtgatattttccaacacccccggctctacctggcgctgctccttcactgtgttatacagccattcccttgcggcgctgctgttagtatagttgtccgccaccgtctgggtattatcattatttgtatacctgggcgtatctgcattggcgtccgcgcccgccacgccgccggcagacatatctgctgccagtgaattatcatttacaacatcttctttatgtagcagaccggttttatcctgctcgtcaatcttatccggagtggaatactgtgtattttcctgaatcagcttttccatgttcagggttcccttaactgagacagccacgttcccctggccgtaaagcttttccagtacgcgccgcacatttgccccgatattgttttcaatcaggcttgtaagggcagtcaggtcctttgcgccgcccaggccgctttcgtccgcgctgttgtccccaatctccatcatggtttccgcgtcaaaaacagagacgctggtaaaattcattccctttacggcgcgggcgatcaggttctttatggccgccgctttatcctgcgtaagggcctttccactctccatggttaccacaacagaggccgatgcatccgcgccggtctggtcagaaatagcgtatttctgctcaccagcctctgcgattgttaccttcgcatcccttactccctcaaacaaacgaatctgggcgcccagacggtcctgcaggtcataaagcgtgtactgctttttatctgattctgttgtcatcaggcctgcgttatctctgtacatatcataggtaaacccgctcttgggatatccctgactcaaaagtctcgctcttgtctgatccacattttccttggtgacctggattgcaccctctttatcattaaaccggtagtcaacattttcctcttgaagaagcgacaccacctcctgggcttcctcctgattcagccccgtgaaaagagtgctgtattctggctgccagccaaatttaagggctataaccgcaaaaacaacaaccactgccgtcactccagtgattgtcattaacattttctttgatttatccgacaatttctgccagttttcctttagagtgtgcattttccatccagccttctgccattattggtttgaactatacgctcattttcatgatttcgttataagactccatggccttatttctcaaagcaaccaacacctcaacgctaagtgctgcttttgcctcagcaataggcagagaatgagcatcgtccaactgccctgtggccaaaagatattttttattttccgcgtcttcctgggtaatgcgcacctgttccacggcgttttccaatatgttctgaaaaagggatttcttttccccaaaaacatttttgttttcagcagaccctatacccggcacggagttccgctcctccattggcctgataaattctgctgataattccattgataattccatcctctacatctcctgttaattgaatttaatgggtaatgcctgattaaaaagttttggctgcagtgcgcagacggttcaattcactgttgattgaatttgccgcctgctgatactcgtaggccgtgcgcacaagctccacctgctcctgatccatgtctacattattgccatccagacgggtagcttcattccaggttgtgcgcagtcctgctctgcttgacctgatggcttccgctattgtgctccgggtcttcctcccatctgcgccgcctgcattttgaatcttttttgccaattcttcctcaaacgttacatactgggctttaaaaccaggggtatccacattggcaatattatttaaagtaatgttctgcctcccccataaatagtccagaaccttttccgtaagccctattccatttccatacattcctgacacattaccactcctttatatttcaaatttcaacattatatatagcaacaatcaggccttatggttatgaaaccgccattaacaatctcattttaaaaagtactgactgatgtctattgtaaaatcacacaaaatttcatctatataagcacccgatatgagtattcttttcaatcaatattttaaggctcaataaaaaatccacctaagatacgacataatgtggattatgtcataaatcatagccggattcgataatttcctgtctaagcttaatgcataaattaatatcaattttattaattttaacaaattttagggattttaaaaatttggggttgcaatcttaatataattgtcatatcatggtatcagttgcaccgtaccatctcatggaaccaattaaagtcgtgctgtaaaaaacacagcagcaactaaaaaaaatccgggaaaaaagtaaggggattcccatacttttagatgtggcagaagccattggatgtatgagttgttctgttgtttgtatattttgaagcattaattacaatatgtaatttttctattctatttttttatgacataatccacattatgtcataatactgatttttcttgaaggttttcactcttatcatcaaacacaagtcccagttccaattgcttctggtaggcctctttgctgctgaccatggtataacgcctggttgtttccacgctgctgtgtcccaggaagtcagccagccggacaagatcctttttctgctcgtagtaacagcgcgcaaacaggtgacgcagattatgaggaaatacctttgtttccgccacctgggcctcaccgcataattctttcatccctgcccagatatttctcctgtccattggctctcccttgtctgtaacaaaaatactaccttttttaatctttttcttgcggcaatagtctttcagaacaatcacaagggcagcaggcaatggaataaacctgtattttcccttacagtcgatttccaccatttggtctttcaatgcttccactgtaatatatttcagttcactgacccgaatccctgtggatgcaatggtctgcagtatacagctcagctgtatctttttctgcatattagcaactctcaccagatttttatattcccgataggaaagttcccgggattcatcccgaaaaaggcacctctgcacccggcaaatattcacagaacactccggcctgccaataaatagcagataactgtttaaagctaccagcatggaattaacgctggtaatcttatattttttctgcaggtatcccttgtacaaaagcacctgttcccgtccccaggcatctgttcccgcaaattcaaggaaacatctggcatctctaacgtatttttccaccgtattcttgctgcgctccctgtcacgcagccaagcggcaaactgttccagtttctgctcttccatgttgttttcctcctagtactgtaatcagttttgttattgggttatctttttattatagtatacccaataatggaagtaaacccaatttccaagtttagtaaaaggatggatatcaactttaactggaatactgccggaaaatcccggcattttcacacaaaatgccggagcgtattttttacgcttcggcaaaactggttatttcaggaaactgttatttccgatttctcagccataaaattcagccatttttcccgcttcatcatggaaacttagtatttgctcatgtcctcccgtgtttcccttctcttttccgctatgtacggctcacttttatttccagcgtcctccgatatccgaaactggtttaaaagagacttcataacattggcctgcccgctcagttcctcgcttgccgcagcgctttcttcagatgtggcggaattcatctgcaccactgaggatatctgcttaacgccctgggagatgtttgcgatagcgtcagcctgctgccgggaggaatccgcgattttttctaccatatccagtatttgcgttgtctgattagccatttcatcaaatgccgcgtctgtgttggctgccagttcctctccattttttacatgctgcagggatcttccaatcagctctgtggtatttttcgccgcgtccgctgacttctgcgccagattgcgaacctcatccgcaacaacagcaaaccccttgcccgcattccctgcacgcgctgcttccactgccgcgtttaatgccagaatattagtctggaatgcaatatcgtcaatcaccttaatgattttttgaatatcctccgaagcaacagcaatatcttttatggccccaagcatctgtttcatttcatcacggcttctgtttacgacctcgctggctttatgccccaccacattggcattttgggcatattcagcgcttttagaaatctgttcggaaatttcgttaatcctgtcggacaaatcttccacgcttcccgcctgctcggtggctccctgagccagggcctgcgctccgctggcaacctggctggcgcccacattcacctgttcagaagcagcatgcagttcgcttatcacatcgcatatctttgagcggaaatccctcaccgaaatttttatatttttgaaattccccaggaattccacatccgtaacgcaggcaaaattgccctttgcgtattctcccattacacagtctatggtctccacatacttcagaagctctttgaaggaaaaattcatgtgttccaccaggatgccgaattcattgtctgcctggtaatcaattgtacttttcaaatcccccttggaaagcccaatcaccgcttcctccaccttattcacaataccggtaatctttctggttgtgacaactgcaaggaaaaggcttcccaccagtacgataaggaatgtgaaaatgcacagccacctgaagattgtaatttcctgcagggatgctttttcactttcactcctcgccagggttgtggctgcatcgactctctgagcgatggaagaaagactgctgagaactggagagcattcattcaatatgatttgctttgcctgttccttattgcctttttcaatctccgaaaccgccctgttggcaatatcaacccactggttaaacgcagcctcatactctgccgccagcccgtcccgctctccgtgagtgcttttgaactgggttatcttctccctggcagccgccaggcttgcgttaatctcagatttcaggttttcctccgaggccctgtcttccgccagcatcatctcccgcaggtcccgtgccgcaacgttcacatgaatcctgcagtcctttatggcagtatccgcggcaattatattgtccagcagtttattggtgttgctttcgatttcccccattccgaacacggaaacagctgtaaggatgcctcccagcacaataatagctgaaaatactgctaacagataagttttcagtttcaccttttcaaacatagtggttctcctttatcttaataatttagtagaaaacatttattttatatatcgtcaaaaactgtaaatagttaagaaaaatttttacatttttttatcagcctggcgctgactcccgcgccggccacataaatcctgcgcgccagttcctttccattttccagagagattatgtattggctgtaaagatcccctgtctgttttgacgggactacaagaatatctgactgaagggacgcggggcttatacagtcttctttctttggcccttcgcctccctcccagtgtggaaggtagattacaatttccgcgttttccctgaccggcccgaactcacaggccgcttttcctcccggtccgtccaggaatacaaaatccgggcattccccagccatatcatacaattcaaagtcttctgccttcgtaccctcaaaggcatcagggcatgtgtctgatacgcagaataggcggcgctgtcctttgtcccggaagctgtcccagaagggttccataagatgccatccctcccggctgccaaccaaaaacacagccaccagggtgccctcaaattccgtttccaggtatttgctgatttctccccgctttccggccagcgttcttcctattttaaagcgtgcccggggttcctgctccgtcaggtactcatagagcagctcgcagtattcctccagcattgccactgtctttgttccgtatccctcttcctgttcaatgatttttccaatggcaatcgctgaattctgcatatcctcaagcagctgttccagcatatccgtattttttttctttaccctggaatccagtagcgcttccccttttccaagggtggcaaccatttcccgcatcttgtgtctcaattgctcccgcatgttactgccgcctttcctcgcttttttatttatatcggcacttttccacaaccaataactattattttaattcccatatttttttcttattcttttttgttttttgccgataaataaataaagctttatgatttacaatttacaactatatttaacgaaagtggtgggaacacaatggataacggcatggataatattcttgatacctatctgtatgaatccaattctttgttggatcagctggatgaaatgctggtaaaggacgaaaaagaaggggacttttccccggatgacgtgaatgaaattttccggatcatgcataccatcaaaggctcctctgccatgatggaatttaattccctttctacaatcgctcatcatattgaggatttgttcttctacatccgcgataaaggaatcgagtccctgaatccggggcataaaagggaactgtttgacctgatgttcaaatcagaggattatttaaggagtgaggtgggaaaggtggaaagcggttctccgctctctgataacattgactcattctcatatgagattaatgaatttctcaaaaaaatcagtgctgaaaaaaacagttccatggaacaggaagcccaggagtctcctgcggttccaaaagccgggccggatgcgcctgccctgccccaggaccccaaagcggtgtgctttttccatattttcctggaggaagggataggaatggaaaacctccgggcttatattatcgtcaatgccctcaaagaatgcggattggaattcagatattatccggcggatatggagagcaatccttccgtctgccaagaccttattgacaatggtttcttcctgtcctttgaaagcaatgaagccgctgcccaggcggagggcattatcaaatcacagaattacataaaatcctatgaactgctggattccccggcccgaactcaggacagggaagctcctgctaaaacccaggattccccggcggcggacaatgtctcactacccgccgcaaagccggccgccgccgctccttccgtctccgcgcccagccattcgccggtaaagcagagcctgatcagcgtcaatctgatgaagctaaacagccttaatgatattgtgggcgaaatcgttattacggaatccatggtcacctcctctccggagctgaaccttctgcccaaagaaagctttgacaactttatgaagtccgcgcggcagctgcgcaaactcacacatgaccttcaggacatttccatgtcgctgcgcatggtgcccatatcaggggtatttcagaagatgaaccgcattgtccgggatatgaagcaaaagctgggaaaagatgtgcgtcttaccatcataggtgaagatacggaagtggacaagacaatcgttgacagcatacaggaccctattatgcatattgtccgcaacagcatggaccacggcattgaggaaacgcaggaggaacggattgaagccggcaaagcagcccagggagaaattattctcagcgcttcccacaccagcagcgaagtggtgatttctgtatctgatgacggctatggaatgaacgcccaaaagctccttgcaaaagcggctgaaaaagggcttcttacaaaaccagaaaacgaatacagccaaaaagaagccttggggcttattatgcttcccggattttcaaccaaccaggctgtaacagaatattccggccgcggtgtgggaatggatgtagtaaaaaagaacgtggaatcagtaggggggactattttcatttccagcgaagcaggtttaggcaccacgattagcatgaagattccccttacactggcaattgtggacggcatgaagataacggttggcgattcgatttttaccatacctgtttccaatatccgccaatccttcaaggtaacggaggagcaggtgattcatgatgaatacggcaatgaaatcgtagactgtctgggcagcttttaccccatcatccggcttcatcaatttttccacatggatacaaatgctcccaacattaaggatggaatactgatatgggtggaagccagcgactgttcctattgcctgctggttgacagccttataggagaacagcaggttgtggtaaaacctcttcccgcatatttaaacacgtttgaactcaaaaattatggtataagcggatgcaccattcttggagatggaaatatcagcatcatcctggatattctcggcctgtacgctgccgctattaaaaatatgtaattgagggaggttttgtgtcatgtccaatcacattgaaagtcaagcagagaagcagcctgaaattcagacaggaagtccgtctgttgagcgctgtcttgtttttgagtccggagccctttctctgtttatgagtacaaattatgtcatcgaaatcataaacggccactccatcactccgattcccatgataccttcgtttattaaggggattttaaaccttcggggacagatacttccggttgtcgatatccgcctttacatgggccatgaggaaatggaattcacccgccagacctgcatcattgttctccaggtggactccctttctttgggaatcattgtggattccgtgcagcaggtaattgatattgacctggcaaatgtccgctccattcctgtaaagcggcagcagaagcttttagacggcatggtaaccctggaagacgggcgtgtccttatgtcctttgactgcaaagcccttattaacgatccgtgctgaaatactacgagaggaggattgattttttatgatcagcctgagtgaagcggattttcaccggatgtatgtttatatccaaaaacattatgggattgacttgtcaaaaaaaaagcagctgattgtaagcaggctttccaatacccttgcaaagatggggtacacggattttaccaggtacgtggatgatctggtatcttcccgcagaccggaaatggttacggatatgcttaataagctgaccactaactatacatactttatgcgcgaagaagagcattttaattatctgtatcaaaccgtgctccctgacctggctaaaaagcatgcccatgataaggtgctttccatctggagcgcaggctgttcttcaggagaagagccctataccatttccatgtatctgaaggattttttcggttcccaggcttctgcctgggatacccgaatcctggccacagatatttcacagagtatcctggataccgctcaacatccctcttaccatgaagaaagcctggcccgcgtcccctcttcatggaagcacaaatattttgtaaagaatggcagcggctcctataccattgcgccggttatccgtgagaatgttattttccggccttttaatctgatggattcgattcagttcaagcggccttttgatattatcttttgccggaatgttatgatttattttgatatgcccacaaaagatgccctggtccggcgcttttttcaggctaccgtaccgggcggttatctttttatcggccattcagaaagcttaagcaaagaaaactgcccctataattatatcgttcctgcaatttaccgccgttgcctataatccgcatgatgcaaaaagaagggattttgttatggataaaaaaatacgtttgatgatagttgatgactctgcggtttacagaagctggctcataagctccttgtcaaaaaatgaccgttttgagattgtggggcacgcagtggacgcctttgacgcccagcggaaaatcccgctgttaaagcctgatatacttacgctggacattgagatgccggggatgtccggcattgattttttaaaaaaacttcttccgctccacccggttcctgttattcttgtatcctctttaagtataaaggtaattgatgcccttgctgccggagccgtggattatgtaaaaaaaccggatatgggaagctctgctgaaaaagacgcctttttaacaaagttatcttccaagcttatgtttgcctccaatttccatgtgcgcattccggatgatacaaaaaaaacagaggtgaggcctcctagccaggcaaaagaccgcggcttctttcatccagtaaggtcaggctcaggcagcggtataatcatcgccattggggcatccacaggaggaaccgaggccattcttgaaattctgacccgttttcctgccaacatgccgggtattgtagttacccaacacatgccggaaggttttacatccatgtacgcggagcgcttaaaccggcagtgccgccttacggtaaaggaggctcagggcggagaacggattcagcctaaccttgtgctgctggctcccggcggcaagcagatgcgcgtagtacggatggggactggttatgcggtacaatgtatgaacggtgaaaaggtaagcgggcaccggccctctgtggatgtgctttttgattcagtggcctacactgcaaaggaaaacgccatgggcatcctgcttacaggcatgggggccgatggggctgccggacttctgcgcatgagaaaaaacggagcctttaccatcggacaggaccgggaatcctgcgttgtttatgggatgccaatggaggcgcataaaataggagccgtatgcgtccaggcaaacttaagctccattcctcaaatagtgatgagccgtctgaccgtaaaatccgggatgacatcatagaccagccatgaaacgcgcaaaaaagaaactaccatcaccgcatttatctttccagcatattttgacagccggcattgccctgtccgccttcacgctgtgcgccagtattttagtatgggcttaccccagccttgtttcaagggctgtctctctgccaaaggagcttttggcacggtcagggcaggcatccgttgaaacggagacggattccaccatggcatcttccccagagcttccctcagagagagaggattcccaaaaaggattggaggagcttatttcctccggggaactgggagaaataaaagattttgatgcataccttacggcagagacggatgagactacttattattatattatggacagcgctatgggccctatgatttattataatcagggggacagccgatgggcggattatttatacggagaccaagatcccatgcggtcccacggctgcggtcccacggccgcggctatggtcatctccagcttttctcctacaagccttacgccgccagaggccgctgagtgggcggcatccaatggattttacgcccgcggtcagggttcatatcacagtctcattacaggttcgctgaccgcatatggcctgaatgtacaaagcgtgacggagcgctcccaagagcatgtatcagatttgctcaaagaaggttcaattttaatagcccttatgggcaaaggctcccttactcagaacggccattttattataattacccaaattttagaaaatggaaatgtccgtatagctgatcccaacagctattcaaacagcacaaaggaatggaagctttcccagcttctgtctgaattaaagcagagccgcgacagcggggctcccctttgggcagtcagccttccttccgaaggctgactttttaggtttcagctttctttccatgctgttccattgctttatcaaaacactgcagctctatgccggaacacttcttccttatcaattcttccagtctgctgtctcctgcctctctggcagcacgcattaaaaggaggcggtccttcagctggtccatattatatagcctctccaaaaaagcacccacctgctctgcattttcccggccgcctccatcctctctttgaaacgcgcgaagcagcagcaccagggcggacggaatatatggatttgctttcaaaagagcggtgcagtactttacgcatcctcccaaatctcctgtctggtaacagcacaaggcaagcagctcccaggctcccggaagatccccggtgaccaccatcccacaattggcgttcccatgggtttcgagcaatgaaaggctcttttttagatgaaaggcagcttttttaaattcacttttctgcgcataaaacctgcctacgataaaatcaaaatcgctttcctccggcaggagccgcgctgccttttcatatatttccagaagcgctttttcatcgttctcctcaacaaggattatcataagtttccaaaaagtcattgcgcttatgaaatcatgcctgcttagtttttccggcatcagattaacggctttgtaataccactcctttgccttttgggattcctttcccgtcaaataggaatccccaagatagcccatcaagtgataattgtcgggatgttcttttaattccattagaagcagccttatattccgctcccctttttctttgttatatacgtcactgcccgcgtatcctgtatgatagattgcaagcaggtccgttgcgtcagccgtatagggcagtattccctccccacgaaaagaaagctcctcatgaatccggtaccggtaggccagcccctcagtccttttaaacagccgtgcctgacttcctccggcaaatatgctttcatcctcccgtacctgaagccatgaggtcattaccgcgtagtactcctttttgtcaaaacgctccaaaagaggaatcagctttttggtctcctccaaagggaaatattcatctgcatctaaaaacgcaatccagtctccggaagctttgctgatggcaaagtttttggcagccgaaaaatcatcctgccactcaaaataaaatacctttgcccccattttctccgccagttccactgtcctgtccgtacttcctgtgtctaccacaatctgctcccagacaactccctttccccagcgcagcgccctttctatattacgctcctcattttttacaatcatgcactgtgataaacgcatgtcctttcccccttgttttaattcaataaatcatccagtctgcagacatccagataatcagttccaatcatatccactccccgaagcatccacctttttatttctgacaccttattacaggaaaacagaccagtcttttttccgtatgcttttatttttttcaccagctctggacagcataagctgcgccggattgaaatccagagaatctcctcattcctgcacatgctttcaatatcctgattattgattgacaaatccatcatttctgcctccgatggaatgtcgtacataatttccagccccatatccctgattatgtcatattcttcccatttcataatcctgaggaccagacgctgccgcagaaaggtatttttcatcaggtctctgtttatgatatttttaatccatctcatctgctctttggtactatttctgatatccaaaataaaatatgcatcctctaattctgctatataagaaaccagcatgctccaatccatggtcctataatgcccatcataataattggaatctataaactgctcatatttcataccattggcaaaacccggctgctcagacaccggctgtcccagcttcataagagtattttttgtccagccgttgacgcataccagtttcttatccagggtcaattttaaatctgtttcaaacagacgaaagccattgttatatttttccaaaatggtatccggagaattcatccctgcaaactggctgttttttcctcctaaagctgctgctgtgagaatacgtttccaatccttttttccaatctctgtttcctccccctgtttctgcttttccgtattaaaaccgtattttttcaggaagcctcccaaagaatccaggattttatcgtccccccccccctgttttttatgcttttcacccatagccctttgcaggcgagaaaccacatccagtgcctccatgcggtcagctttcacaaaacgttccggatgcccaattccagccccccattgtgccagcttatcattccacaccaatcctatgctggggcatcccacggaataggctatgatattggtatgcagccttgttgcgatgattcccttataatctgatataatccgcaccagctccgcgccctctgccggacgttttctgataaatttttttttattttccacgccgatatattcaagaacatctaatccaaattcgtaatctgaatgcaggccattgttaaatatctcccactgataccctaattcctccagcctgaatatcacctgtttccaaaaatccagaagaaactctctggtaatattctgatggccataatcaaaaaacaatccgtcacgtgctattccaagccctattttatccgtatccggatttccggaaataccataaacctctgaacaaaatgcagcggaatccggaacctgtccaatccactctttttccgtcaccagataatgctttataaaggtctggtaatcatcacgaaccgtaatgcccttaacgcagacatcattgaccgctattttaagacgccggcatctttcatcccattcatcatatccttcgaccccggtacagtttataaaaacaggaatactattttccgatgcaatcctgataatgtccggaacatactgataaaatttctctctcctgtatttaatcaatccgccgccggcaaaaataaccacatcagaatttttaacatattccatatcttcctggtacatgttataatcgtgaattacataattttggattcccgcattttgcagcgctttttctacaaaatactttgcacactccgcaatcacggtatcccctaaattgcggttgatgtactctgccaggaggatattcaatttcttgttttccataagcctatcccctccatccctctccactatagcagcgtatccgctatgaatcgctttttctgcagctcttgagcaatttttttccaatcatatcctgacgcaagactttttgcacatttcttaatcccctcatcctctgtgcgcgtaagggcaatccttatgttctggatggcttcatctacagaagcgcttctgtacagggcgggagaatcaggaagacggcccatatcagatgcaactacctgctttccgcaggcaaggtattgaaaatattcctttggaaccgtattcgcatgtctaccaaaaaaaggaagaattcctatatcaagggattgtatcattgacggaagttcttcataagacaccggtatataatgaagattatcaaacccgtgcatccatacaggatatgttccaaaaacctcccctgcaaatataacatcacaatcagaaaacacctcacagatacactgcaccattgcaaaataaatcctgttatctattaccccggcaaatccaattcgtttccgcccgcccatatattttgcactgtgagaatatgatgaaaacattgggtaatccactccgccggtaatattgcaaaccgccacattggcgcattcagttatgccgtaataataggcaatatcctcaatctcagcagaagaccggcctgttaatcttcgtaattctccaggtatctcttctgtaatatacagatatctttgagctgggtttttaccaattgcctccagctgctgctcttttgaaacaggttttgttgaatcaatgatttcatatgtttccggcacatgcttttttaaaagttccgctgaggaggggtatcttgataaagtgatttcttctgctttttcctctttctccggcagccctctgtaatttataattgtctcataacagcgcctggatgactggtcatccataaagtcaaacctgtatgccagcacactttcccgttccttttcatatttttccggattattaaacgcttcctccaaagcggacagcatatccttaaaataacgaaccttttcaccgggcataaacatatctatattatggaatacaaagcctctctcagatacatattcctcataatccggaataagatatacaatgggcctgttcagcagaagataatcgtatgctatggatgagtaatcgctgaccataacgtcaaatacattaagcagatcacaatatcgcgtatcattctcaaacagcaaatcatccgttaattcaaagcagtccggaccaagagaaaatttccttcctgaaaaagccgtttgttcaatcggatgaagtttatatataaaagccgcctggttttcctttaaaaagtctgcaaatccttctttttcataatccttcaggcgaaaaaggttgtctgaaaaaatcgttccggaatggctgctgctgttggcccgaaatgagggagcgaaaaaaatataccgcttatagtttcttatcctgctcccaaacattttttccatcttcccatatccctgtgtctttttgacactgtccaggcgcgcctggcctgtaacatagcatttccgcaaatcgtaatgaagctgggcagaaagcttaaaacggtcgtccaagctatgtacacacatcaaatctattttatcaaaaaattttgccagtttttttgcatattccgggtccatatcatgattgtagaaatcgtgggccttaattccacttccatgccaaagattaacaaatatctggtttgcacgttttggcaggcgctcaaaggtgtaggaattcataatgacataatctgcttcctttaataaagcatttccctccacagtatcgtaaacagcacacctgacacctcttcttaacagttcataatactttttatccctttttaccagccaggccgtctcatgatttgtattatctttcacatattcccagagagcatgtggattgcaggcaaaatccggctgtgacataaacacaaacagcatttaaaaacacctctcaattataatggaatcccgtaatacgtcatcatccgccggcaggcctcctccagtgatacctgctcgctccacccaagactgcttaatttgctagagcttgtgcagactcttgaaaccgcatgctttactgccggatcgttttttcttgtttcccggttaaagtccacctgaatcgatttcccttttacctgtcctgccatggtctgtgcaagttccaggacagaagcttcgcccatttccgtgcatatattgtaagcctgtgcgttctctccttccaacatcacataaagcatcccggcaatggcgtctgtcatatatataaatgtccttaccggtgtcccatcccctttaaggacaatcttatctgatttcagtatctgagatataaaatctatgtgaagccttccgtcatccaatgcaattccgcatcccattatctgtccgggccttacaattttacaaacagaacctctctgaccatagcagacgcataaattttcagcagcccgctttgccactgcatatacatttctcacatcaagggaatccagtattccggcctcatcctctgaaaatctctcctgatgggatctcccataaatatcaacactggaaaggtaaagaaattctgcatgatgatgctgtgcaagcttcagcaggttgctgcagccaaacacatttgtctcaaaagtggcaaccggatcttcattgctgattttcactccggccgggcttgcagcgtcaatgataaaatctattttcttttcaatttttatctcttccaggacatctccaatcaataacgtaaaatcttctctgtcaaaatactctccaaagcgctctcttgccttattctcattcctgcacagggcaatgacatggatgtcttcattagacattttgtttctcatcataaacccgtgtacaaaatgctgagggacatatccgttggctccggcaatcaagatggttttgttatgaaacttttgccaattaataggcgtctgcgcaatcgtcaatgcgtcttcttccagaatcctgttcatttcccacctccatacaatttttcctgttctataaacagcggatataatgcttctgctatggcaagatcctccggatatgtaactttgatacaaaaccgatcacccatgaccatgctgcattccacaccaagattcaaaacaagttcactgtcctcatttacttccaccctctgctcgtcctgcagataagattgatgtgcctgctttaacactgaataccggtatatctgcggtccctgctgcacaaataattttttcttttgcagcgttctgtttaccatcttcccattgttgctgaaagtaatagcatctgttgctttaataaccgtaatgctggcatcatataatgatatctgctcatacaatttgtccattgttttttgagatacaaagggacatacagccgtcataataataaccgtatcccttgctttagccggaagggccataatcccgttatacacggattcatatcgttcctttccggattctgccaaaataagcatctttgttattccatatttgaaggcccactctttaattttttcatggtatttggcaggcgcacagacgcaaattacatccacgttcctgttttcctgggctgttctcagagagtataccaacattggatatcctgtcatctcaataaactgcttcggcacatctccctgaaatctgacccctttccctcctgccagaataatcgcgtaattcataatccacctcattcattacatgttgatatattttacttcccactgtaccatccaaatttgccaggtgcttagaaatcacttccagcctatggtctctaaaacccgcaatttcttcatgattttcaagaaacaggctgagggcatttatattcttttccttataatacggcctgtgctccagggagccataaaattcttcctttgttatctcgttttccagcaattcttccggataatggtaggctgtgagcatcattggttttcctgtaactgaatagatggtcacaagtgaaccgcctgctccaaaataacaatcagacacagccattgccaaatgaggttcttcattttcatccaatatacccaattcccattcctcaaattcctttttcagcttcagatagcttacgagaagttcagggtgcatggagtgtaaagtctccatggttagaggatgctccctccacagcaaaacgaatttgtccctgtgcgctgcaaagacatgaaaaatgcggtatagattatcaataaagtgtgctccgttatttaaaatcaggctgacatttgtattaaaaaatacaaccctcctgtttccaatcctctgtttccatgtttccggcatttctgcccggttgtttatttccagaagcaatttgtctgttttgggagaaccaagggcagcaatttttttctccagacgtctgctttccccatggtacagctttgtctcaagaagtttcacatactgcttttttatggattcactttgaacaaatatgatatctgcagaaatcacccccggagtcagaacaaagtgctccggaatagaccagggcacaacataatatggaatatataccaatttatctgtatattcttttaaatggtccgagtaaaaaaaggggggtatacttgtcacccggttaaaggcatcataaggattgtggatgaatatcacgtccggacgtttctcctggaaattataatctctgtaatccaccacaggcacataagaaggatagcggtctccttcatagtgttcttcctcaaaactgccgtccggatttttactataatatggtatggggattacgacagcatccacattcttgtcctcatccgccgctctccagatgctttcaagggaatcccacatactcaccttgtacggcaggaaaacaatctcctttctgtcatccggcacttcaatccacacatcctgttcaagctctgtcaatagaacccggattctttccaacagccctttatacaagccctcatctgaaatatttgcgcttacctgatatatatgttcgcagtattcttccagaagccggaccatatgcccgcatcttccgcctaaggactcaagatatgtgcctatgagaatccctaattcctggcaggcagccagcgtatccagggttgttgaaggatcagacttaatggttttcctgattgcatcatttgcattcaatagagcttccactgtatggaatatttcttttttcttatattttctcatttgcattatcctgctgtttttattctataataggtcatgtcataaaacccttttcgatacaggaaaagccatttaaagcatccgctttcaaatggcttttcctaaatatcccgcaataaaacgggttactatacgtactgctgattaccggagcagacttaaaacattctgcggaacagcattggactgggacagcatggactgtgcagcctgaagcagaacattgttctttgtgaacgccgtaatctcatccgccatatcagtatcgcggatacggctctccgctgctgtgatattctcagaagtaaccttcaggttgttaatggtatgctccagacggttctgggaagcaccaaggtgcgcacggtaagtggagaccttatcaatagcgctattgattttttcaagagcatcgcttgcgtcagactgtgctgataccttagcatccttaacgccaagtgttgcagaatccattgcgctggccttaaccaaaatagtttctgcctttgtcggaccaatctggaatgtcatatcgccggtgctgccagttgaagcaatcggcttaaccccgttaaagtccgtatactctgcaatacggttaatctcttcattcagcttatcaaactcagtctggatattgtttcttgcaacagagttgtaagtaccgtttgctgactgggtagccagagtcaccatacgctgaagcatggagtgaacctcggtcagggcgccttctgctgtctggatcagaccgattgcatcatttgcgttgactgccgcctgattcagaccattgatctgggatctcatctgctcggaaatagccagaccggctgcatcgtcgcctgcgcggttaatcttataaccggaagacagcttctccaggttcttgttcagggagctctgatttgtgcctaaatttctgtaagaattaattgcggatatgttgtgctgaattaccataaataatttcctccttgaattgttctctatacttgccgaaacctccatgtaccggctttggtgttcttcacgggcccgtttttgaacacagctggaagggtaactattttcccttacatggtataatatcggctgtttttctatttccataaggattttttttattatatttcataaaaaataacctgatgtttcaactttccgcacagtcaaatggcaaaccatcaaccaatgtgaaggtcatccttggaccatcctgctcattccggaatcctgatataaaccgccccgtaaaatatatactcttctaccataatctttttggcgcgttccaaaacatgacggtaacactcttccatactgtctgcaaaagcagctgcatttcccttgcatagatactgatgtgctgtgagaaccaaatcgttaagcgataaaatgttccgtctttttttcgtataatacgtaatatagtacccccattcagtaagccggaacgcctcagtcagtatgacacgcataggctctaactcaatatgttttaaaacagcctcaaacatatcaattaaataaatagaatcggttcggctgaacttttcagttaattcctttatctctttttctgtaaaccgctcagctgcaagcagtgcggccggatgaaagattaatgtgagtaattgaagcgaattgagatagcgcagtgcctcctttgtgcgccttggattcggaagcagctggcttaccctggaatcatccggttccgtaactatggttccctttgcattcatcttctttacataacctctttcttccagctcagccagcgcctttctgactgtggatacggatactctgtactggttggctaattgcttttcatagggaagatatgttcccctcggataaaatccgctgccgattttccggtttaaatcactgacaattctggcgtaacagtagtcctgtccacgtgtgggattccatgaaaacggtaccggggattgaattggacatttaggcacagtacctgccaggtatttcatggtaccggcaatggaatccgaaagcctttgatataaggctgttaattgcctgtattttacagaggaatcctgtccttttaaaatatccataagagcgcctgtcccaaatatattgtcctgtaaaaaggtttccgtaaaataagaacattgctctgtaaaaaacgtgagtttactgtggagttcaaatgttgaatataggtctccaatcaaagggcttccccctgttttcagaatgtctctgtttaaagcggaaggcggacgccacccacccgcagccatacctgcctttgctgcttcagctgcctgtccataatgaggcattatctccaagtcgcatccgcgggatgcaaatgtcaaaagcggcggcattatgtaaactaaagtttgatataactgtgtgataccatccctttgtttcaatatactcagtactatattctctggatgaggcatattctttcttaaaacaacctgcggggcaagtctgggctggttttcaatcaatccctcctcctttaatgcctctaatacgttattaattgtatacaggcttacctgaaattcatcgcacaaccatctagatgacggaaggcggctaccgggcaatatctgaccatctgttattctctgttttaattcatcatacacgtaagaaaacttggtcgtttgtggaaccatggtttatctcctcctactttataagctgtttttattatatccaatgccttccaggctgtcatcgaccaaaaatatccagctatttgtatacctatacagttcaaattccgaaggaaataaaaaaataagaatagggaattccctatccttattttttaatcagaaaccttttcagcaatcgtgacacttccatgatatcaattggctttgcaatatgggcgttcatgccgcactcatggcagcgctgtatgtcgtcagaaaaggcatccgcactcatggcaatgattggaacagataaagcatcagagcggttcagctcacgaattgcctttgtaacctcatatcctgtcatgtgcggcattcgtatatccataagaacagcatcgtaatatccctctggtgatttttggaacttattcaggcatatctgtccgtcttccgcccaatccagctccacgcccaggtcggataacaattcatttgcgacctcccaattcagttcattatcctcagcaagcaggatgcggtgcccggacagatcaatattcgggtccaatatctgttcatggactgtttcaatgcccatatattgacggagactatgaaacagcgtagatttaaacagcggttttgaaataaaaccactaatgcccgcctggcgggcttctgtttcaaattcgctccaatcatatgctgaaatcagaagaatcggcaccttatctcctaaattgcgccgtatttcctttgctgcctgaataccattcataccaggcagtttccagtctaacaggattacttgataatcatcccccttgttgtggcgttgaatcaccaattctatggcctcttctccgcttaatgtccattcagcatttattcccatggatttcagtgcgtccatggctgttttacataataattcgtcatcgtcaactaccagcatattccagggcggaaggaccatatccccctccactgcatcagctttttcaaaatcaaacgcaatccgaaattccgtacctctatcaggctcgctttgtacatcaatagtcccttccattgcgtccacaatgtactttgtaatcgccatccccaaaccggcaccttcggttttatgtattctagcttcatccgcgcggctgtaggattcatatatttttttcaaaaagtcctgcgacatgccgattccattgtcgctgacattgatatgaatcctgacataatcttctcctttgggggatttttcttcaaacaggaacaaccgtatggagcctccctccggcgtatatttagttgcattggacaaaagattcagcaaaacctgattcaaacgcacaccatcgcaccatacgttttccgtcacaacattttcaatatgaatgtcaaatgtttgttttttggccttcacctggggctgcataatgctgacaatccctccaacaacttcctttaaagagatttgctctgttgtcaaagtcaatttaccgctttcaattttggacatatccaaaacatcgttgattagccccaataaatgtctgctggacagtgcaatctttctcaggcaattctgtacctgctccctgtcatccatgtgggctgttgcaaccgcagtcatgcccacaatcgcattcatgggcgtacggatatcatggctcatatttgctaaaaactcactctttgccctgcttgcctccagcgcctcctgacgtgccttctccaattcaaacagctgggaacgggtcatggaaaaataccggaaaaagattaatgtcagaatgattaatacagaaacgcaggacaacaatgtcatgaacatacgctggctgctcaggctgttaatgatattgtccaaaattccgtaaggcattaccgctaccaggtaccactcagaataaggcaatggtataccacaaattttccgctcctcaccctttacttcaaatattgtggaatactctctgttatctcttaaggcatcgccaaactctttaacagagttttcggcagacggcttatctgaagcagaatcaatctgattttgtatcagattaaaaaatcccagtagctctgtattagaattttgtatcacaaaactggcgtccggccggataatatgataatacatcaattggctttcgtcttccaaggcaagaagatcagtgacatactccaaaggaacagccgctatcaggccgatgctcttatccccatttctcaagggataatctgcgtcaacaccaaacaataccacttcattaccatctgcgtcagttcccacagcactcctttgttccccctgaattaacgtttcaacaaaagacaatggattaagcggctgtatgggatttccataaatagtttcaaagtctccctttgcagagcagagggctaaatactcaaaccccctgacctgcgccctgtaaacaagttcctcatataagttttctgtttcactgccctcccctgaaacaacggaaacaatgccgtgaacctgttcaaaacgcagtttaaccacattttcaaagcgcttggccatttgttcattcattccagacatatagatttctccaacttcataaatggtctttttgctcttttgattcatataaattcccagcatgctgaaaataacaatactaaaaaacaaaagtccaataaagctgtattttagaaaccgcgttgtagcattctttttttgactgctccccattgtattgttattcctccctggaccttttatattctttcaccttattaataatttggcaataatcatttgataattggggcatcatatcaactgctttattataatcgttttcttttaatgcatttgtcataaggctgctgcttgcatataacctgccaaatgaaagattctgacaaatacctttgagtgtatgaacagcccgaagcgcctctccataatccctatccctcatagccgcttcaaacaaatcaaaacttttatcatccagaaatttataaacaaatttctggacagtctgttcacgccgcaatctgcccagcacctcatcaaaatcaccgccaaaactattatagcaatctcttaaatccatatttatatttcctctctttttagatgtcatctgcttctttgtcaagaaaacgtattgccgctttgttctttgtgatttttgcctgatacatcatactgtctgcaactttaaacagttcctttggttttcccattccatatgctcctcctatgcttacagacatatgtatttcgggatattcgtccaccttcaggatatcaacagagtgtcttattctctccagcttttgttcaaaaacatctgcaggcatactgttaaatataattacaaattcatcaccgccataacgaatcacggcgtctgtctttcgtacacatgataaaatagtctgggcaatgctctggagcacgatatcgcctacattgtgcccatacgtatcattaatctgcttgaagttatctacatctatcataacgaaagcctgaatattttcttcaccttgaaaatgctcgtcataataacggcggttgaatacattagttaaggaatcaatatataataactgcaggtgtctctgtttatgggacaagatagtgtatttttccctggaaaacagtctgtcatagtctattttacttctcatattctgtatatcattagtttctttttcagatgaggcaaacgttaactcatgtttaagtgtatccgaaatttcttgcaggcatagtaaaagaacaggattaaaggccccgcattgaccatctaaaatcattttcaatgcttcatcatgtgaatatgcattcttatagcacctcttgctgatcagagcatcatatacatcagccaaagcaaccacctgagcagcaataggtatttcgtcaccctttagtccatccggatagccattgccgtcatatctttcatgatgccaacggcagatttcaaaagccactttgacaagcggcgccttctgctgttccatcggcaattccatcagaatctttccgccgattgctgagtgcgttttcatcacttcaaactcctctgccgtaaggcgtcccggcttattcaatatcgtatctgaaattgagatttttccaatatcatgaagtgatgaagcagtacttattaaagttatatcagatttagataaaggatacttatctgtccgctgaaccagctgtttcagcagatattttgtaatgatattcacatgcagtatatgcaaaccgctctctccattgcggaattccacaatatgagacaggattgcgatcatcagcttattatttttttcctgttcatagaattgttctgcgataatttcttcaagacgctgctgccgtgcatataaaaacatcgtattcgaaatccggcgttggacaattgtagaatcaaagggacggctgatatagtcaaatgcccccaagtcataggcgcgttttatattcgcgggagaatcatcagcagaaatcataataacagcaaaggtatcattccaatggttcttgtttatacaggttaatacttcaaatccgtccatttgaggcatcataatatccagaagcaggagagagaaatctgttctctgctgtaaaagaatcgcaaccgcttctgcaccgttctcagcttctacaatatcatattggtcttccagaatatctatcaaaaggtcacggttcatctctgaatcgtccacaattaaaattttttgtttttccatatgttataatctcttcaaaaaaatttacagtttcattataaatatattctatgcaccaaggtaatgatcatattggacaggtacacatatagtttatggcttttgggctgataagttaacgtttacaaagtataattaaattaatactgaaggagatgaattatggagccggggaaaccaaattctcattcatacataatgaaataaagcagcgcataagtaatactggaaattggcggcaatcctttactgggtaatctttattctgcttttgaacttcatcataacctaggtttttactgagcaatgtcctcctattctgttgcaatttcttggaagccgacacgatgaaaagaatactttatcttaagaataatcagcgatttaaaccagaaaatcagtagcggcaagtatgaatatggcatgtatcttactaatgaaaggcaattagccagtcagtatagcatctccgtatcaacggtcagaaaggtactaagcgaacttgagcaatgaggtcttgtagaaaccttaaatgccaaaaggactattgttatagaaactgatccggcaagtcattgcagcggtacagcatctacgcaaggaaaacacagactcttttgcagatggaattacagattgttaccgttactctttaatccgatgtgcatagtgtatgccgcattcttacgaacattcagaattctaaagcatggcaaagcggtaaatccatagcaccgctttgcccgctctgtaactggttgaaaataaaggtcaggctttatgacagttccccggattagtttcaaaaatacaatgctgaactatactgttccccgctgggcataataatcatcaaacatcttggtgaccgctgtatgcgtattgccgcaaatagatggaagttcacctccccatgccacgccggcctgttgaaatcctttttccacagctgcctgcatctccttcattttacttacatcatctcccgcaagagcgtacgcgaaatcgaagattctctgagaagtctgcgacaccccccaatatccattctctgagattgcctcctgggcctctgccttaatctgtggatctactgtaaagttaccgctcgctatcatcttccagaaatcattttctttggcctgattggctgtaatcccctgcttctggaaggtctgcatcatcatattggtaaaacgagacatctgattgttcaaatcctcttttagactctgtacaagagaggatctctccgattcactcatcttactggtgacggccctatccttattgaattccgcacaatccacatcctgcttctgaacactggaaacaatttctttcatatctggcgcctcggccgcaactgttgatgtttttcccattttttgaactgtctgtgtatattgtctgatggctgcatcctgatttacattaacttgcatatctcatttcctttctccaggcacaaaatattatgaaaacagtttgcctggacctacttttctgttatatttcttaatcgcggggaactgcgtaaacctatattaaattgacaactttgtttgtaacttgcacaatcgtataaagctagcaaatattaggactccctctatttctcatatctatcaatctcctttacccccatagaaacttatcttttaaatctatatcggcaattctgaataaaagataagagaacaatacgtcctttatatgatatttcattctcaaagtacttactttatctaaaataagatgaagcatctcatggaatttattagttgcttcttatctccttgggccatcaagccgtctataagtactaggcatcgaagtaaacgtagcttatcgatggttccttggccttgataaaacacccggtatagcaaatcttctgattgatgatggaatcaggccgctcctgccatacaggtgtcccatgccccaaaaagggttcttcaaaaaatatgagtacgtgtatgatgagtattacgattgctatatctgtccaaacaatcaggtactgtcctatcgaacaaccaaccgtgatggatatcgtgaatataagagttgtggtactgtcatatgggaagcatacatggaaacgtgtgaagatatccgtcatacacttgggatgaaagaattatattccctaagaaaagaaaccattgaacgggtattcgcaaggcaaaggagaatcatggattccggtatacacagatgtttggaaaagcccggatggaaatgaaagccgggcttacatttgcctgcatgaatcttaaaaagctggcgaagattaaggccaaatggggactcctgagggaaggaggcccactcaaaagttctattttatatgtaatccggttaataaaaaaatgggggctgtgaaaaaatggagttgatttaattccatttttccacagcccttctatttttatcaacatgcaggagaacagctataaagagcgcatacttccccttaccccaacaaacgtatgcgttttcttctttaagctacttccctttgcctcttctgtttattatgaaatttatagagattatgaccaattgaaaccagaaataactctaatcttaccgattcctgtcctcttcttacaatccgtttataccaacggtcatatttgatgattccgaaggttccttccgcttgtatggagcggttcattcgcagcagcgctccatggatgctctgcagattttctaatacttcctggtgcatggaacttaattccgcattgatacggaccgtcctgtttttttctgtcttcttacatctttctgcatagggacagccgctgcagtcttcacaggtatagtattcttcctgtctgccgtattgattccccttcactgctttccgatacgcgaagtgaaatttccttccgtttggacagattagatcaccctctgaatctgtttcaaaatttactgcccggaacggatcatcatgatacttctcatccgttgtctctttcttgtacatggggaatttcatgaatttttccatcccatgctcctgacagaacagatagttattgaaggagccatatcctgcatccgctacggcaatgtactcgtcagccactccgatctgaatgttgtatgctggaaggagctggtcatttcccatatagtcctttttcatccgcataaaggttgcatcatgatcggtcttcgcataactgtttcgctcaggtccgcatatctgaattttttccacgtattctgagagtttttcgatatattcttttaacctttcataatagcgctgctcccggcttttccgatgtccccggccgtatacaaacgtgttctcatcgatatgacagacaaaatcatatctggataaaatggcttccagactgtccggtgtgtattccgtattggtctcgattttcagtccggtatatgccagtgtttcattcatttcggtaagcagtgtggtaatcttatcaaacaaacggtatcttgatttttcagtggcttttttccaaacccaggtgtacttgtttgcatttgcctcgaatttagaaccatcgatatacaagtgctgcaggtcggtcccctccgctgcctggatataagagatggctgctttaaaaatatcctgggcagattcttttatctcttcattaataaagtagctgaaggcgcgatagctgggtgtttcctgatccatcagatacatgtaacgaagattcactctgcaccggtcttctaattcccgcagggaagcgtatcctgtgtccataaagccgaacaggatcgtctttagcatgttgactcgattatatcctggccgtcccatcttgtgtaagggctccggcttaagatacttttctcttccaatctcctccatgattttgtcaaatgctaataccgaatcacagatatccaaacgatctgaaataaacagtggtaatcttccctgttttgagttataatatctttcggtattattattcatagtagcttaattttaccacaaaaagaagaacgcctccaggtttcatacctgaaagcgttcttcttacttttaggggacttttttcacagcccctttttatctgacagcacagaccgacttcctttctatcagttcccccttcatgagaatgcggctggcggccgccccatcttctatctggtgtatcaaacaccgcacactctcttccgccaggcggtcaattggagcattataagtagtcagcgggggaatcatatactccgtcatgaatatattatcaaaccctgccacggaaacatctcccggtatagtaaatccattctcacttatcccgctatagataccaatggccaatatatccaaacttgcaaaaaaagcagtaggcctgtgattcataactttcggtataactgctactaagcaaacggcatagcgatatgtgctttattttattttgttcgtttttattctaacattttaactgctcctggattaagttatccaatataaaaaaatactccgctcttatttcctcgtcgttattttttaatacttcttcatttttattgatacgctcttcccggtattttttaatataatcctcctgctctacacttcttcccattttatccttcctttgacgttttttgtacctctataaacagagccgatggtgttgaataccatcgtatcaattactgtataaaatcctgctgaataactgctattacaagacttttccctgataggcatatctaccaacgtatataagaatatcagctctccttgtttgaattgaccatctacttctgtaataactattttctttcccatataggtcataaaatctcctattttgtaaaaatcctgcccttttacttttatacgagttcctattttatttcctataggccataataatatactgtactcatcttcagaaagtgatgtaacttctttccctattcgcattccaaactaaattgggcctgcctgtttcaatgtcaggaattatactaatatccaaattttctgccatcctttctgcaaattgctaggcagtctcctcgtcacgtattacggggtatcctattattttatcactttcctgattccttattacctgtcccccttcattttgtacagactgtctaacagcttctccataggtcattttaggattttgaaaagagctgctgaatttctgtctatccaactggctggatgctgatgttacttttaaaaacacttgatcaattccacctacactatttatttccattcctgttatacatccttgaaacaaaatttgtatcttctcatttcacgttccaaagctttacatagctatcataacataggataggattccacggtattgttacatctatgtacccaatcaactgaagctgtgcatgacaatctggtttccatgaatattgaaaactttccacttttttaatcggaagattcatttcaatttttatattttctgtaagttttatctccataatctatctctttccttatctgcaatataattattgtagaagtttcgttactaactcaatattctcttcgattataataatcatctatatatttgttaccttttatgtttattatctccccatttatgcttataaagcaatcgttgacaaagaaaaattctggtctttccccccataggccccaatactttattttcttcggcatgtaacaccccaagataccaaagtcaatatttcttccgacataaatgtttacatacccccccccccgtagcacctaagctacatacttctaagatcattatatacttattatcagaggaatagacaatttctatgttctctcttgttgtgttaaacatatcattaccataaaaaaagaaaccaccaattaataagtacattataaaaactataaagttaatgcctacaactattactttgacatatttttttttaaattcacaaagtaaaagaattataaatgatgatattacaaatggtagtaaagataatcgaaacaaacttatgcaacttatgattaatattatagtaggccaaaaattgtaaaaaatgggaagatattttccattactcattcttatcatttttttatcataccaatacaaatgattactgctataataaaatagaacacctcaatttttgattcaaaacgatatttaaaaacaagctcaaataaaaaatttaagcttattataattactgccattttataataattttttccgcataaatattttaggatttttgtaagcatttttttccttttaattttattactctactatacccatatagtcattatacccatcttttattgcaattttatcttcctctggatcccccacccaaacttttggaaaattgcttgacctctgtgcaagatcagaaccatttaaaagcttattgagagcatcttcccccaatctataataataaaggcgctggagaattggcagtgttcttctgcaatatctgtttttccagggtatggaaaacgatgtgtttttacccccttaaacccccgggtgtgcgccattgtaccatagaactatccggagtgtcaatttcgattcccttgcgttttccttactgaaatcttactgacaaacggatttcaatgggtcgaaaagagataaaatcgttattcatgggtggcttggcggcacccagcttcttaaatgtgcaggattctgccacccggcgtctctaaaatactgctgaaaataagaaaactaccgggtggcgtttcgtcccctgttttgctctccggctcccggtattccgtgtggttctttaacattccgtatacgatatttaccaagcgtctggcgatgcagattaatgcctgggatttattcttgccttcctccagctttttcaggaaatattcccggaataccgcattcctcggcgttccgctgggcgctacctgcaccatctggattgcaagaaaataaaagatggcctgtaatctccggtttccctgttttgggcacacatccttcccttttcctgctgaggaaaaattgatgggtgcgattccggcgaacttcgccagtttctttgcgttgggaaaacggtcaatgtttcctatctccgcaagtatatttgctgctgtgataatatcgattcccggcatggtcatcagggtacagtcaaactcagggagcatggcttcgattgccgcctccacttcctccatctgtttccggtagtgttccaaatcatatgccagacttctggtgatgatgttacggctttcctgacagtcccggtacgtctctccatctgattttaccagttccagtatcttttccgctcgcttgacagaacagttattgtggctcaccgggcgcagttctcctgccagttcctctgcggtctttcctctcaggtgtaccggtgacgggtactcatgaaaaaaatataaagcagttgggcgaccaatgtcctggaagaatttcttatagctgggatacgccatgcagagctgctcatgaagctggttctttaatctctgctgatggatattgatgttatccctccggttcacgagttggctcagcgtccagtatttatcatccggaattgcatccggcagtctgtccaacatgttaatcagcaccagcgccaccgcttccgcatcgtagctatcacttttctggtacattgggacgctttttctctgggcataggacaatgccgtatttacatctttgacaacgaatcctttttcaaacagccatactgccagtgcgcggccatagccgtaagcgttctccaagccgtaaacggctgtcttttcctctgttacaaaccggctgacttttctcgtcagcttatgaaattccgccggtttgttctcgatcgtgatctctcccagcttgtggttccagcagtccagcatgaccgctgtgtgggtttccttatgcaggtcaatccccacataaataatgttctcttttctcaactaccatccttccttcacttcctgtctccatctccagccacagatgccgccggcaacctcaactgataagcgttatatgccgatttacgcgcaaaagctacggccatcgcaaggggggaaaagcctatccgtccctataaccaaaggtttctacaggttattcctcttccgaggtgtgtcgtatgttacctctggttacgaacggattcaagtcctttttctctggattttccgatttgtgtaaggtgctttaaaatctgtcctctggtttggtgcattgtggtatcgacttctgcggagccttccggtatcctctgtggtgcgaagggaggtgaacgcaatgagtgagaaagaatggatagaatatatcatctacgaacggatggaactgcactggcaggaactgtcccattccaaggcagacggcaggcaggaagaatcacagatgttagaccgggtggaggcaatcctgaaacggctgaccaaaaaagagcgaaaaaccatcaaccggttcttcgatttgaccacagaacgtcatgcaaaagaaaccgcttatctttacacctgcggtgttaaggacggtattcgtgccatgaaattaatcaacagtctttaaaacaggaacagcacacgccgccgctcctcatgaagtatgacggcatgtgctgttcctgttttctatgtgtatctgctgtctgtttttttctaaagattccgctgtgtttcctcccccttacccccccccctggtgtgcgccattttaccatggaaccgtcttggaaatcaatttctttttccttgcatatttcttaccatatccttactgccaacattcctctcagggtcgaaaaattttcttctgggtggcttggtggcacccagcttttttcatttccggtattctgccactcacggtgaacaattcgcccatgaaaggaggactgttccgggtgacggagccgcaaaattgttatgctggatacccctgttttttgaatacctttttgcggattctccaaaaactttatgctggtatcctgcattgttacagcccaaaagcacaattttaagccatttccaggttttcttcagagaagctaccgggtacaaacctatgcaggtagaatcctgccatcattttcaggcagacagacgaatttatccgtgagttgtttccttccgctcgctcgccgcaattctcttgcctttgtgacgcgccgtgaccgcccgtgttgcccttttccggccgaactcgaaaagatgtaccatgaaccagatatatcggctcgttgacccgatgtgaaacaactacatttttccgaaaattgagaaaaatagtagggtcgaaatgtgtgctggttaaaggttgggtggcttgatgccacccaaccgtggaacatcgcccggcaaagccgggcagaaattactataattgattgtagactgaaataaaactgttaattgtttcgctaaattggcatatatctacactgcttttgcctttagagtaaatatacactatcccctcttctttgaatgtatctctattatcccaggatatttctattttatctttcacttttctaaaatagacatcagctaagaatgaacctgcccttgctgaaaaccaagaatgtctaaacatccaatcttgtaatttttcgtattgctcaatatcgtctaaatccattttataactaagttcacaaagttctgccgctgaatctccagatacttccagaggaaattcatcatcttgtaatataaacatcagattttcttgaaaccattctttaatatcattaaaatctctccacctgtatgaataaatggttccatttgctttaaattgcaaaatatccttgccattaatatataaagacatttggtaagcggctatatctttacttaattcaattgcaaacacctttttgtttccaagtaaattcatcatacctcctttttacctaataccaattgttttttataagtttgttataatcagttttacttataactccatcatctaacatttttttgtaaacatctgttggaacctctttggctgtattggaaaccttataagcatgccacttccccgaactactatctggctggaacttaattatatcaccttcgtacatgctgtataattgcttattttttgatgaggaatatgcattatctaataattcttgccctacttcattattaggtattggattctcacttccccatcctccctgtgggttatgttttggactaggttcataaatacgttcttcagcatgagaatccccctcaatagttctctgcctcggtttctcccaagcctctccagttagaacgcccgttcccaaatccacaacaacattgattacaagatttctggccaatcgctcatagtccacttctcccgccaccaggtaatccagcgcagcccaagctgctgcttctcccgcagccttggctactgttccactgacaaatcccatcccggtcacagtaagcgggtcattgcctggtttgtgaagaacataagttctgcactggccacagacagcgcataatcctccaaactactcacctttccctgaatggcgtcactcaccatcattcctccacccgccattcctgctgtcacagcggcacctgctatgacgggagtcgaagctcccatggacccacagaccacaactgcagttcccccaattaccacaacagtaacagccgccctgcctgctgctttttcgaagttccactttccttcctgggggccatccggataagggggattgccttcggatccagcctctgcttctaatagggtcctggcctttccacaaatgtccaactcatctttcatgagtcccacgaaggcagtcggatcaagctgacacccgccctcctttccttcctccattggcccgatgcctataagaatggtatctacatttgctttcagcttcacttttgatccatctatatttatagatttgttatgctggatacctctttttttgaataactttttccagctttctagaaaaatgtatgccagcaaatagctcagatgtcgccgaaaccaacgattttaatgtgtttctgagctttttacaagaaaagctttgattcaaaccaacagattccgtctattcctggaaaaacagccagttttatgccctaactcggaaaaatataccatcaggcaagtattctggctcgttggccggatgtaaagcaggggtgcttccctccaaaacgggcgatttagttagggtcgaaaagtgtgtagtttaaagagtttatgccatgaggtggcataaacgcagaggacaccgcccggcaaagccgggcaaatatattacctatttatcatttgcaattcttttcgcattttatgcgtttcaatatcagctaatcttgttggtaacggaatatggctttcattgttagccaactcgcatactaactttgttgctgaatccaaatcaatatagtttccaaccgataaaaaaattggtcgtacatctttcatggtccgtaaaactcgtccgtaaatttctccatcaaccataatatcggtataagcaaatttctcattaggtggcatactatactctacatctttgattttataataattcttcgcaacacctatcgttggcctgttcaggaagaaagaggcatgggttgcaattcccatatgacgtggatgcaaatatccattaccatcaaacatatataaatcagaatttgaatctagtttttggattgtatccaaaataagtggtaattcacgaaatgcaaggcatccaggtatgtacggcacatttacttctctaaaagaatatttgctttctataatacactttgagtctttctctagtaccacaatacagcatacagcgtattctttagttcccgttttccaataagccaggtctatgccagctatagtttttactttttcagcattacatccaaataattgtatcttaggagttagctcattttgtattaaaattgcttcctctaaagaaagattactccaaatttgtttactcatagttcacactcgacaatttttttattagtaacatttcgctttcagtaggacttactttttcataaactaaatttccctgctcatcccatttttcaattgataaacatatcccacaattatatatccccttctcttttattttcccatcttgataccattctgtctcctcagtacattttcctcgcttcattttgctaatactacgaatcgttccatctttatagaactttacaaaatcaccttctgaaaagccgttgacataatagcaataatatgaaatcctaccattatcatataattcatatgtaatcccagtgaatggcttaccaccattttcttcataattgtctaaaattctatcgctgcaatactcaaaagctaaattgtcaaaatttatacctttctttaaaattattgcctcatcaatggctgttctttccatattttaacacctccggataaaaataaataccttctgcaagatattcacaatgcggacacctcggtactggcatacctgatacaggaatagacttactaactcgtctcgcacttattacatttaaatataaatcatcaagatttgctgcaatacccgctttttctcttgcccatagtgcctcattaagagcatatatttccgcatgtgaaccagcacctctagtttttgtatatgaatttaaaattgattcgggcatattggaaaaccgtgtttctaacagtggatgcaagtttgaaggtaaatatccctcaaggtcattaattccaaaataatatttttaactctaactcttaaaacagaaaaagaacaggggaagtcctctctctgctgtgcttctctccattataaacaatccaacagccagtttcaaacagtttcttcctctgttcttctctccggttccctgtattctgtgtggttctttaacattccgtacacgatatttaccagacgccttgcgatacaaatcagcgcctgctgtttattctttccctcatcctgttttttctgaaaatactcccggaataccggatgtctcgccgttccgctgggggatacctgcaccatctaaatcgccagaaaataaaagatggcctgtaaccgcctgtttccctgtttcgggcacatatcccttccttttcccgctgatgaaaagtttactggggcaatcccggcgaattttaccagcttgctggcattgggaaatcgtttaatgttcccgatttccgacaggatgtttgccgctgtgacaatatcaattcccggcatcgtcatcaaggtgcactgaaagcaaggcaggatgccttttatcgcctcttccacctccaacatctgttcccggtaatgctgccaatccagcaccagacctcttgttatgatatcacggctctcctggcagtctctcaggatttcaccatcggatctcactagttccagtattttctctgcctttttgaccgagcagttattatggctcaccgggcgcagttctcccgccagttcctccgctgtctttccccgcagatgcactggggatgggtattctccaaaaaaatacaatgccgttggacgaccgacatcctcaaagaactttttatagctgggataagccatgcacagctgttcatgaagctgattctttaatctctgttgatggacattgatgttatctcttcagttcactaactgactcagtgtccagtatttatcatccaggattgcgtctggcaatctgtccagcatgttaatcagcaccagcgcaaccgcttctgcatcatagctgtcacttttctgatacatggggacgcattttctctgggcgtaggacagggctgtgtttacatcttttacgatatatcccttttcaatcagccacaccgccaaggtgcgaccatagccgtatgcgttttccaatccatagacaggtgtcttttcctctgttacaaaccggctgactttcctcgtcagcttatggaattgtgctggtttattctctatcgtgatttctcccagcttctggttccagcagtccagcatgaccgctgtgtgtgtttctttatgcaggtctatccctacatagatgatattctcttttctcaagtaccatccttcctttttctcctgtctacatcttcagccagaaatccgctggcaacctcaactgataagcgttatgtgccgatttacgcccaaaggccacggccatcgcaaggggggacaagcctatccgttcccataaccaaaggtttcacaggttactcctcccagagattttcccctctggaagtgtgtcgtatgttacctctgatgacggatggattcaagtcctatcccggatatttttccgatttgtgtaagatgcttccaaaacccagcctcggtttgttgctttgtggtatcgactttaaccggaacttccagtatcctttgtggcaaaggaggtgattcagccatgaatgaaaaagaattactgaacatgatggttacagagcggattcagattcttgtgcaggaaatgaaatcggcccggactctggcagaacaggaaaacactcgtctgttgatggaccaggcggaaggcatcttaaaacggctgtcagagcaggaacacgctctcatggaacagtatctggattccatgacagaccgcatggccgatgtggagccggctttgtacactggcggattccaggatgacatccgagtcatgaagtttattaacagcctgtaacagcagaaaaagaacactgccactctccatgaatataggagaacgggcagtgttcttttctctgcttttctttttgcagaatctgtttctcttccagagtctggaaaacggtgtgtttccacccccttaaacccccgggtgtgcgccattgtaccatggaattatccggagtgtcaatttcaattcccttgcttttttcttactgaaaccttacccacatccgaatttcaaaagctgaaattcggatgtatgggtggcttcccggcacccggcttttgtggttttcagaattctgcccccggcatctctaaagcatcgctgaaaacaagaaattcgctgggtggaaaagccggaattagttatgctggatgcccttgttttttgaataactttctttgggattccagaaaatcttatgccggcagacagcgcagatatagctgaaacccacggttttaaggcatttcctggcttttgacaaagaaaacctttgattcaaccgggtgcggtcagcgaatctccgtttatttcctgaaaacagagcagattaccgtccgagcatcgacacgctatctctccccgtcattctcttacccctgtaacgcaccgtgaccgtctatgtgccagttttaaggcccacctcggaaagatgtaccatggagcaagtatgttggctttctagcccgatgtgaaacatggagattttcctccaaatcaagcgaaattgttagggtcgaaaagtgtgcaggttaaagtctgggtggcttgatgccacccagacggaagacattgcctggcaaagccgggcagataataactactgtaaattttcttttttatcgtttaatttttttatcattagaccatcttcatttattcctttttctattaatttgttttttaaccattttacttgattttgtgtcccacaataatatatgtctttaggcagtattgaactatcataatttttcaataatttttttaataaatattttattttaacgttattcgaagaacttgctagtccccatctcccctctctttttataattagctctttaatatcatcaggaatactatcaattccgttaccatccatttctgtgtttatcttacaactattgcaatggtaggaggcataccacctaaatgtaccactcagaatactatcgcctacattaatgcaaagagttcctccacatttgcaattattcattagttccatcctctcatttctttatatctcttaatagtttcataaaatattctttctttgtctgttccgattggatgatggttaataatcccccgtttccaccatctatggtaatgcaggatcctttaaggtttctgaccttaaaggatctggattatatcgaactcaaggaactcggcagattccggcagaagactgtaaaacagcgtacccgtctaaaaatatagctgacttcttacatggatcaggtattcccggagctccagtatttctttaagtccggtgtacatcaaaactctgtttacgctctccttaaggaggctcccacaccgaatgcgattgcttccatgcatatgactcatcttgctcatatccttgaatgtgcttcccacggccatttcaaaaaggatacagccagagatttaagagttctcgcacaaaagtcggtcggtatcaatgacagtgccttatctattcaaataactcagaccattgaacagattgagttattggatagccagttattccatacagagcttgaaatggcaaaccttgtcacctgccttcactctgtgatcatgaccatcccgggcattgggactaccaatggcggaatgatacttggtgagattggcgatatccatctcttctctacaccgggcaaattgcttgcatttgccggattggatccgtctgtttatcagtctggtaacttccaggccaagaagacccggatgtccaaacgaggctcgcgtgttcttcgttacgctctcgtaaatgcagcacataatgttgtaatgaacaatgcgactttcaaagcttactacgatgccaagagagccgaaggccggactcactataatgcccttgggcactgtgccggcaaacttgtcagggtcatatggaagatgctcactgacgaagtggaatttaacctcgaataagaggtctgcataccaatatcgatagattttgaacaagcacctttagggacctaccatcgattagaaaaatgaatgttcgcctaatttatacttgacttttcatagctagtctcctgtgccgggggtgggacagataaataaattctcttctcatattccatatcctttaatctgcacgattttgcggagcagcttttaaaggaacttgattaacagtaaccggtatatcctttgctgacctgcaatttataggtgtaggcggaatccattttattataaattttcgattttcactttttcgctttccagtccagaataaatgccagtgaccgccacgccaatgtggttttggtgacattctcctctggctagctgtgctcctatccatattgtaatcgtattgaacagaattatcttcggaaacaatttttgctttctttagtttatttacgactcgataccctacatcccaatttctgatttcccggtatttatcttttattatcctcccggcagtccgtccatggcctttccctggcaattctttcaaatcagcattttcagcggtaatatacaacagcagctgacataatttagataatatttccctccaatattttatataaatgattatttctatgttaggatcacccttaagaaaagttatacctgcttcagttgccgcttttgtgacagccccggtgatcccattactcaggttaatccccttctccaatctgatttctgaaaaattaaaattcaaagtatcttcctttttgactgccatgcatctcagtaaaggagtaccatctttcacctgatcatatgcaacgaaaaatccatgataccgatctcccaatatctgtggtgtttctatataaaagcagggaaatggtaaatttcgcaatacatccaatggtagattcaaatctgcctgcttatacaataagtcttccatttcaggtgcaaagcgatatacctctttatactgtctccatgatgccaacattgacagggtgacggcaagctcccgggggcttgcctccatttggacgtggtacggaccatttaaaagtatactttcatatatctaccaggcgggtatatatatatcttctctccatgggttgtgacctgtagaaagcatatctgctctggctttttcaatagcagcccatatctcaggtaattttttatttgccaattcaatcgcttttaatgggggaaaagattcaatatttttcataatgtatttcatgaccttttctatagcatttatctgacaacttgtaaattataattgagtgacagcccttatacttgaacgaatactaagttctgtctatactttcattaatagtttctatttcatgttccaaaaacaaatgcattaactctatcgcatagagctcttgttttgaaagtatggtttggcctgaatcagttatattccttgatttcttctctttgaggttcctataacacaatacataaggcagcatatcataacccttacaatttaatattgccttaacagttaaaatatccatttaacaaattcacctataatactaacgataccaagttttaccatgctaaaaaactgataccaaaacgacatcggcaatgcgcccagccatattgaaacacctttgcactctttaaatacggttactaatcccaatttattttcacgcacatcctctggtaaatgcaaaaaatcaattcttttctttatatttttccagtatatgctatctgccatgaatcctatcataataaatttaatactataaatcacccatttaaaaatgttatatgccatatctgtattaaaaattatttgattatatactaaaacaaaataaacagtaaatatcagatagtataagagttcacaaaaaatcattacagcaacgccttcaagccacatctttctatatccaaaccaataacctccgaacaaagccgctgcaaagttaaatttcctcttcctctgtagacttttaaagcgtattaaatacttttcgttaccttttccaacaaactctattatttcaggaactgaatatccatttaattctttttccatatagtgtatactcctttattacatagggtcaccttgcaggacttttgatagaacgaccgtgtattgacctgtatatccattatgaccctcttccaaaatgctgagtttaacatcatttggttttaaataatatctctcattgcctgtatagtttattccgtttccattaaaaggagtatattcaactacaagaacatcacctccaggcaactccgcatttaatgcctcatctatatcctccaagtcatcattcaaatcaaaagccttatccataccatcaataccgtgatttttagcttccctactaatatacgatttcacagcatcctcggcttggtcttttaattcgtcactaacgatatcctttggtataccttctgatataggcctctctaaccatccagcatttggaccatatgtactcttttgtacccattcactaattttattaaaccctttcccaattattgggatttttccaactattaagaatagtaggttttcattacgtcgtatttctcttatttcttccaaactatatatatgataatcatcaacttttaatgttccctttgaatctaaaccttgaatataatccaaaaccatttgagaatttttatctgcctctgtccctccaaacctacgcaaactcccatctgcctcaaaaaattccatcccagcttttctcttctcctcaaaagctttcaatatcgcattcacagcatcttgctccggtatttcgcacacctcattcattggactaaaaatgtttatttcactgcttttcatctgtacttgactgtcagtcaacagcactcccttttctccgttgtgcatccagatataatcctttgccatcagcgaaatttcatttgctttcccttttatactttctgcatataactcaatatcgccctttgagttaatggtgatagcctctttcgctaccacaatttttgttccttgcccttttgaatgaatccatattccacttccatccaatactgctccaagccccgccgcggttaccagacactttgtatttggtaaaggattactttttccggtactaggatttaccatctgactgattttccccggacttgcacctgtggaacttataatgtagcgctcgctttccgtatccgaagcaaaatatagctgcagcgtatcccccatctctggccttcctccatacccacgtcctgttcctgcataataggccggttgtatgtgccaactctcaactgtttctccttctgagtcagattccagctttagctgaacctgacccagctgggaatttatcacagtcccttttatggaagttcctctcagattttcattttttagtgtttcaatctcacattctcctgtggatttcaatacataatcatactgccaatctccgtctatcagataagcttcggcctcaactacaatcatgggttttcccatgtatttggctggcgatcccagttctatttcagcagacgtcctaaaaatattataaacttttccactctgaatagacacataccccatatccttatccaatttactaagattatgaaaatttattccctgtctcaccagactacccgataaatctttttccccccttagacaataataattttctcaataatgcaaaaacgagagccactaccaccattagtaaaagtaaattaaaccatttatgtagctggaatattaaaatcaaagaaaaggtaaaaaaagacactcaaacatatgcacatgtaccatactttttcttattactccttttcaactgatatattccataaatagtgagaataagtcctgaaaggaaaatattgtaataaaacaatacgtccaagaaacaggccaatgatggtaaataccatcatatgaaattacaaccatttttaattagcgcatttttttcactctttattctatcttttttcacgaataaacaatcagtatcaaaagtagcaacaacgagtacccctgtcttttccccagcgattatacttgttaaaaacgcaatcattctatatttttcaaaagctgcgtcctctgcaatacgaaaacaattccaatcattttcaatagcaatcacatttgatgggactaattgagtgggacaaattaataagcgttcatcatcggttattgatataaagcaatatttattttcaaatatagtgatgtcaatttttatcctctaacttacatatggaaaattcctgttttatttcctgtaaaagcatacttcaacttttcgtttaagttgtttggtatataagctcttacacattatccgcaggctcttgcccgcaagtgtagacccatcataaccacaaagccaagccccagctttataagcgtactgcacattccatagccaattcaaacgtatgtaccttttggataataggccgtgaggttaagcctcgctgttcccacacatttgtatcaagattatcacaagcataaacaaattgagcaaatgtaattttccgtaaccgtgcagcagcagctaaagcggcacattccatttctactgcgatacacccttgtgccttacgtcgtattatcttttcttgtgtttcacggtatggcgcgtcagttgtccatatctttccttttgtgtaaggtagtcctttgcttttgaacagattttcaattatttcaacagaatatgtatcaagttcaatttcatcagacgcaggctgataatggtaactggttccctcgtctcgaatggcagatgtaggaatgattaaatgtgcgtcctcaatagattgatccaatacaccacattctccacaaacaagaactttttttgcccctagtgcaatcagttcttcaagattgcttacacatgcaggagcgcctatcattacttgacaaactgctattctaacattaccaaacataatttcgtaaatagttgtatttccaccaacactaattaggtgggctatttttttacctttgtatttttctacaataacttgtatcatggcttccgaaaattcacaaacaacaacttctggaaaactttgtttcggtttatcaatcacatattctggtttcaaaattccccaaggttcattgtcaaattgttctaaaataagtcgttccatatttttcttacctcctataaaacataatagtctcagatatagccaacgacattacctattaccgcctcaatcatgccatagtaggcaccctcccataaaaatgttttgtataggatcccggtgctcatgccaatggcccgctgcataccacattctctatacccccgccactaccttccttctaaacgaatacaattctctttaaagattgcttcgtatatctgctctttggaaaatacccaatcgggatgcaatgccagataagcaagggtaaagaactcatgataagttaggggcacggggtggctattacctcccatgttctctgattccgtatcgctgttcaagcagccaacacttggccttttgttaagtctacattcaacggcacactataaaactatgtaggattaaggtgagctataattattagttcatctataaaaatcatagcatattcaaattatccttttttcttgcgcagattcaggtcaatattgttctttgccgctgcattctgcagtaatccagcaacaaaagcgcttttttctttgaacgtcagtgtttccatatcaggtttacaatcaatttctttaagtaccgtttgcaggtcttgcagttccagcaggttgacggctacacaaaagagtgtctttttgcggccatcattataattggataataaaacctccagaatgttggccttctccgcctgctctgcactataagcgtctatcccaaggcgtttggccttttccatatcggattttcgatttcgatgtgttataaaggaatcaaagtcatcaatatgatcgtatttttcgcaagggtattcgctgcattggaaacagtattgggcgccgtcgtgctccatgctgcaccttgcaattttgcaggattggttcccctcaccgccgccgcagccggggcagtttttattcaggaacatggggcaaagcccacaattcaaaccgcagagagaaaataattgattttgtcggttaaaccctttcattgaacctccttaaacagcctacctgcaaacggttaggataggctctgataatgcttgacctaacacagtaggaaatttgaaaatttaaaactcatatcttgtaccatgcgagagcaacaggccatctgttaattccacttgcaaaatgatggtattttcatcgttaaaatcagtatggccgttatcaatccattcagcaaagacttttttcagcttatcagcaatctcacaattctcttttttcccgaaatagcccaagttaacgccttttccatgcgctgtaaaccacacacctgcgactgcaacaacaggattatcttttatatgcttcattttatttgagagtgcatgggtaatgatataaaatgcaccattttcgtaacaggcatttacataccgcacatgaggcatttcatttttcgtggttgccagtgctataactgtatcttttccgaaacgatcaatcataaccagttctgcttctccactaaatcctttcattacgtcattctcctttcaaattacactttttcaagtctgttcagacaaattggatgttgtctttcaaaatctatctgtaccaattttttctcattaggcagcatatgttccaaagttttgattgaatgatagccaatttcaagcattgcatcctctaatgtttgttcttccacctgatgatgtacttgttctaaatcgtcaaaaacatgaatataaggggaatctgacacccaattatcccctatattgatttggataatacatgaaacatattttggatttacttgttggattgctttctgaaaacacatatatccaatatactcaatcagcagatttgcaataaccatgtctgcttttggcaatttatccgtttcatctatcaaattgatacacaaacatttcagagaaccgtccaattccggatacctttgtatgactgtctgcaaatagaaagagttgatgtcaactccatatattctttcaaatttgtctttctgaatatgttcaagaccattaccacctgcaacccccaataccattatacgggaaacagaataagcagcaacttgcattttcagcatttcactcatagcctgcaactgcataatagaatcaaggctcatgtgattttcataatcagttaatggaatttcctcccactctgaaaatttgaatttaccctattgcctttttcatccagatgtctaaaaaggcaagttgttcatctgtatgaaaccaatgtttcccattttccattacagtaagatgtgtattgtgattattaataaattcatttactgtttgacgagatatgaggttatcatttcctgcatataaaatttctgtgggaacattccatgttataggattttccctaacaaagcataaatatttccatgataatgtttccccaaaatccgtagggatttctcccttctcacgcaaatccttctctgatacatttgcccaattcatcatgtccagtataagacgttccatgtcaagtacaggcgatataaataaagcctttgcaatatcacaatcttgcaatgtgtgcattgcaaaataagcgcctatactgtttgcaatcaaataaatacagtcgtatctttcgcgaactttgtcataaaccgattgaatttggttttgtacaatccacggaaaataatcattatagtctataccgataatatcgaaaccctgacaattcttcttgtactgttcagcttctaaataacttccaccttttccatgaatatataaaattattcttttcaaaatatcacctctacaaatcccgggttgtttgttagtctaccatgtattagatattcagaagtttagtcaaatcctccacgaaagcatccattttcacagagacttcttccatcgtcatgccggaatcaagaaaacgctttatcaccattttcatatcctcgccgacctcaatgatgtggtcgtctaaatcgtagaaccggattacccgctgtccccggctatgtttgatcacttctcccaggtattcaatgtctgggtattctttcagctagtttaaaaaaccgtcaaaatcctgttcctcgtttgaaaaaactcaacaaactgggagttgttacattgtagggtacgttcattatacatgcattgttgtttttactcttgattgtgcaatttcttcaaatagctgtttttcatttaggtctttaaaaactctttttggaattaacgtatatattcgtggtgcttgaattaagtaataaaaatcatggctctcccatagtgcagagtaaatgtcccacttcatttctgtttcaatgctctgtgttttaaatttaatggtttccttagaaaataccagcgtatattcctcatgatattttgcagtttgtttgaatttcagtataggcattagaatatataaatagcttcccaatgcagttacaacaattatcaatccaaatattaaaatactaaatacgctaaaagaggagaacagcatgtaaactactgacagcaacaaaaatacagcgactaaagcaatatcatatttatgtatagttttactaataattaaatattgcctttctgcttttatatattcactttgagtatattgaaatcttaattttactgtttccaaaggtatacccccattcgttatataatctttgttgcaacttccgatttgtttattcgcctaccgtacattaactattcagaagtttcgttaagtcctctacggaagcatccatttttacagaaacctcttccatagtcataccggtagcaagaaaacgctttatcaccatttacatatcctcaatattactcattaagtccacatcatgtgttccacgggcgcggttatgatggatggtgctggccatacggtcgggcagcggtttatcgattatcgaaaccggcatcttccccttctcacgctcttaaatatccttgtaatcccgcattacacgccaacgatgaaagccatcaactatcacatacttatcatttctttttacatgataacaaacaatcggcatagtaaaacgtcctccttaatgctgtcatacaacaaccgctataggtcatggaaatttttcgtttcctcacaaggtgcttggttgatagtgatatttttatgatagagaggggcggcagcactttaggctgtcgtcccttgattgcctataagcaaaagtaggcgggactgtcaacggcggctcgcagagccgtccatcttgaccgttgattggctcgactggttttgctaactgctcgacaaattgaacaatatctatcatagaatatcttgaaaataatttaggaatttcttctttcttatttcttcggattctttttgtttttctttttcatcaagttcttgaaccacctgtatatcacctgttcccgaaagagcttcaagtagcttgcgtatctcattttgggctagggaacccgaacccaaagacagactcaccattaagatgagaaataatttatatatcttttctttcaatacatattcctccaattcaatctcataataagtatgtggtttatactcgctatctgtttgcatacaaaaagaaagccattatgtgattctgaaaatggcttgcaaccactagcaatgatttgaaaaggagttaattcaattgtccagacgtactttttgactaattaatgtccattcatcgggcaataatctaaataaggttaaaaagaaataaagaaaaactataataaggaaaaaaagcaggctgaatccttttgggatagctgcaattataggtattggatatatattcttcgttacagtttcagtatgagaattattatcgctcgataatgaaaccttaaaatgggtggtatcatcatctccttcactggaaacgatattttccgaaattgcccacgcttcagttacagttgtcttatcgattaattcataatgattataattactacaaaagagcacattcatagttaagctagcagcgaaaagaagtataatgaaaaaaaataaaatatgagatagataatttttcttatcacttattttcattacaattcctttcttagctgccgctacgtttaatgtgatcaacttaaactacattgattttaattctatatattgaaatgtaggaaaattccaatttgctatgtaatttctgattttattttagcatatcagtattaacttttctataaatttttccttatattttacggaatagagggataaactgtctatcaaattgttgtgttactttacgacacatgagcattagctcacggattgtttcctctggcagcccacctccggtctcatgccagaaatggatggagatataaaactcttcgcataattattctgcagacgggcaggaaatgtatccagcaaaaattgagtataagatttccaggtatgaccttccggtaacgtaatactgcggtaccccatcgcttttgtctttccataattgcaccaaaatttgctccgcgcacccgccccaccagattcgtccatatttccgggtcgatgacctggtacagattcaaagcatctttggagtaatcattaaaaggcgatgctacccgcatctggtctatttttaatcctgccttataatacagatcatataaattgttgtaatcataattgatgcgataattcgcacaccatacgtcagaatttgaccagtcgtataaaggtgaggcaaacaatacgtctttaaactgcctggaaatccagcactcattttgataaccgtatttcttattgataaaactactgtaccgctgcaaagattcatccgcccgcataccaagcagacagaccgtcctgccgttaccatgctcctccttgtagaatcgcccaaactgctttgctaagtcttcctgatgcatccggtaacgatagtgggtaaaaggctttgccagattaatgacatagggatactccggtatcgggcgcacacatatatcctgtttggtatcatcccaaggataccaatacatctcataactactcagtgctgtcctggtagccataggaaggtataatggatatagctaatcaatcatatctttagccattgccaccatttcatcttttgatacattcttattaatgtccataaggatgtagcaaacatccccattaatccaagacagagaattagcctgagccgtaccataatacatatctatttccccatattttataacagtagtatcttttgaatgagattgccctgatgccggttcggcagataaggaaaccgatttggtggtattattgtccttttttaaatatcggaagtcgatacctttatgtttgttgatttgagcgccatttgtatccaaatcaaataattctgttatatgaccactattaaactgataaccgcctgctagggtttctggggccttaggcttgaatcccacatctttttgcagagtatctgcatccgggagcgtggtatattgagcttcttcggaattggaaacactgaccatcgacgactgggatgcaaaacagggtactgtatgcatcagacaaattcctgtcattaataatattgcaatctttcttttcacgactcataactcctttcttaaatgaggttatttaatgttttacaaatacgattatagcaaatacttctctaaaaaacatctaaggatatatttggaaatttatatcaacccattaccagctgtttttattaacacactgctgcagcctgtattcctgcgattgctccatcggcaactgctgtagctacttgtcttaccttttttacacagatatctcccgcagcaaaaactccgggaatttctgtctgcatcaattcatccactggaatatatccgttatctaacttcaattccgtatatatctgagtgttcggaacaatacctgcatatacaaatactccgcactctgcatcctttatgatctgttttttccctgttttgttgtccgtaaattcaagctcctcagctctttcgttaccatatactgctgtgagacttgaatgcggcataatttcaatattatggtatgcagcaactttatctttaaattcttgtatacatacaagttcatcttccacacatacaattgttacctttcctgcaattccagccaggtaaatggcttcctttactgcgccatctgctccaccaatgatatagatattcttacccttataatcaaaaccatcttttggtgcatttaatctgataccttttaaactttcacctggaattcctaacatacgaccagaaccaccattcgctagaattactgttttacattcataactgcctttatctgtaacaactttcttaatattacctatgagctttgtctctgtaacattttcataacgaatctctacgccggcactaagtgcttgctctttcatacgttcagcaaatgtcttaccagattcttctttcatgattgcagtataatgcgtaactgttgagacagttccaatcaaaccgccaacctgattcttttccaacatcagaatcctttttcctctgctttttccataaatagctgcactgataccggctggtccagctccaataataattatatcatacatttgaatatcctcctgttgcttatacggaaatatcaccttatttatatagctatcccactgattctacaatcttatttaagttttattcgtttcagagatccttgattgatagcatatgcaatatactatattttaccctttatgaacattatattcataatatttgtgacagatatttctacaatcaccagcaaaataaagaaaacttttaatgtgatagctccaaatgtaatatgcggttatgcggcaggcaggattacaaaatactttttaatgctcttgtccccattaccatggcattgtcaaaatacccctgttcaattaatacactcccattaattgttccacaaaaaccgagcaaatgctgccgataactattactgccccggatagtagatgaaatgtaggaagtagtacgataagatcaagtattaatggaggaatggatttcagcgccaaaataatcggctgcaggcttttattcaagattgggtgaagcccaatcagtacaccaaggactataccgcttatcaaagcttaaaaatatcctaggattaataacttcatgaagctgataaaacagcttcttttcttctcattgtagatatattacttccgtctaccttttaatatttctttttttatatacaatgatctccgcattggatccatccgcatcatattcactaactatcagaacgctctcatccgctgctatcccatagtatctgctactatcttttttgctaagctggttacctaaatatatcttgtcatcatctaacagtttcactgcctgaccgctcgaaaacgtatatgtaagattgatatatgatcccttgcacgcattaagcccagtaatttcttccatatcttcaatgccaagcatacagaattctgcaatcatctgttctttaagcctgcatttttcattgtggcatttcccgcaatgctcatatccattacttagacagcatgccgccagcacacacccgccatgaaaaggatgtccctctgtcacagcacaaccatagcatgtttcttttaattcacatttcatacaatcaatcccacaaattgaatttctcatagatttcctccataaaaaaatcttttttgttacattgttagcgcaagtaatgggtgcagctccccttttcgttccatcttgatcaactcttcatccgtcacccattttacatctacaacctctgtttcctgaagtgtgatatctgaaatatcgacatctttataaaatacccacacatcatacaaatccctcgtttgttcccgacaaatccgggaaatcctcttcccatctttcggattcagaataatccccaattcttcatttacttcccggagagctccacccaaactgtcttcccctgaaaggaccgcccccctgtacactcccagcggagtggatatggtttgtccggatgtctctgggaaagaagatattctccccgattgtttataatccacacactcacaaccagatgataacatccttccggaataggtcttccccgtaccagtgtgtaacccgtcttatttcctttggcatcatacagatcccagacctctttcataataataccacctatgatatatacaatttcctacttagtttttcaatattatggagctttcttattactagcacactttgttagtacaattgtacctctgtaatctattcattcccatactgaaaaaagcaaccttctgacctatctataactttctgattggaaaaaacatataattcttcccagtaagcggtctaataaaatcatgaaccgctcccaccaatgagataccattatctttcaaatattttattgtctttgaacaagaatcctcactgtcacgttccacataaatgtactcataaccagaaataatccactttgcccagccatcaggagcttctgcctcataattacattcaatccctttttgcggacagattaccgtgtccaactaaaaattcaacacttaaattttgtaccaccagcctgtatattcccggctccagcgttccataaatattaaggtcatatgtttcactcgcacttttcccatctggcaagacacaggctaaatcctcaaaacctatattatctgcctgaactggcatcgtgtaccactggccgtctatctgcttctggagagagaaatatctgccgtaagaaaattcttcaccgctgttatttgcaatagacacggtaatcctacttggttgaatatcctccacagacataaccaccccttccactacttccccatccggttcctccgctttcatcataaagaacagatgataggcggtcaaaagccctgcattgggaaaattcagcaccgttagggaattatcctcatccgccccctccatttgttcccataaaagtgaaaggtctgtgtccccataataaatcgtaccgtcatttttaagccagacacctttggatagtgccacggtaatatcatatccctccttatcactaatccgtattccataaaagggaacttccatacctgcaattgcatctttgtctgcaatctccataggtagtgcattaatcttttttatcaattctttttccatggcggggtcgtacagggttcttagtgtaacggctttcccatcaaaataataaaactggaaagcacttgtatccggacttgccccagcaaggatatttccatctttgctgctgttctgtttcccatacagaactattatcagaagaatacccattataataagcaatattaagagataacacaggtacacttttttcactttcatcttcggaaataacttcactattactctcctgatttttttgcaaacatatttgatttttctatttcgtcatctttcactagtcaagtttttttaatattactattttagaaaagaactaggttatccattctcttatcacccaaagtatcctaattacttttttcagatatttatacaaccatcacgatacaaatccaggttgctttcagtccattgctggacggtgttccccatactttcaccatatgaccttctgacagaaaatcggcagttgcttctgacatttcataactgtcccctccattcttaatagtctgtattgcgactatggtattctcatcatatgtaaccgtgactttgttaaattccgaatcatcaccatttcctggggataccacgatatcgccgccattgtctgctttttctgtaatagcctctacaactgtgaactgtccttcctggagttccttaatacttccttccagattcggattgctgtcttcccatttctcgaaagtgttttctgtaaatgactctagagtggaagccttctcttccgaaggtgtttcacctgactcctctggttgctgtgtcggagcagtttcaactgcatctatctgttcgagttttttacctccacaggcacacaccacaaggctcacgacacacagaatacttgccataagaaacagctttcttactctctttttcatttgattctcctctcatttgtaaaatcgctgcagattatagttaaattttaccatattttcctctaaatatcctctaaggcaccttaagtcagaaaccttttcagtaaacgggacacttccacgatatcaataggttttgctatatgagcattcataccgaactccaagcaacgttgtatgtcatcagaaaaagcatctgcactcatcgctataattggaatcgacagggcatcagggtgattcagtccccgaatcgcttttgtggcttcatatcctgtcatatgcggcattcgtatgtccataagaatgatatcgtaataaccctccgatgatttttggaacttgtccagacatatccggccatcctccgcccaatccagttccacgcccaagtctgtcagaagttcttttgcaacctcccagttcagctcattatcctcggcaagcaggatgcggcgtccggatagatcaatattttgattcaatgtatgctcatgctctgttccaacgtccatatactgacataaagcatgatacagcgtagatttaaaaagcggcttggaaataaaaccgctgatacctgcttcacgggcctctgcttcaaattcactccagtcatatgcagaaatcaacaaaatcggcacttcatctcccagattactccggatttctttcgcaacctgaattccattcatacccggcagtttccaatccagcagaataatttgataatcttctctctttttgtggtgttcatttaccaattctattgccttttctccgcttaatgtccattctgctcttattccgatggatttcagcgcgtcaatggctgtctcgcataataattcgtcatcatcaaccaccagcatattccaggcgggaagaaccatatccatttccattgcggcggctttttcaaaatcaaacatgagtagaaattcggtacctttatctggctcactttgtatatcgatggttccttccattgcatccacaatatactttgtaatcgccatgcccaaaccggccccctccgttttatgtatccgggctccatccgcacggctataggattcatatattcttttcaggaattcgggcgacatgccaattccattatccttaactttgatataaatccgtacatagttttcccctttcggagatttttcttcagagagggataactgtattgagcctccctccggtgtatacttcgttgcattcgataagagattaagtaaaacctgatttaagcgtatgccgtcacaccacacattttctgttaatatattttcaacgtgtatgtcaaaggtctgctttttagtcttaacctgtggctgcatgatgttaacaatgccttcaacgacttcctttaatgaaatttgttcggttgtcaacgttaatttgccactttcaatttttgacatatctaaaacgtcattgatcagccctaagagatgtttgcttgataatgtaatctttctgaggcaattctctacttgtttcctgtcatccatgtgggctgtggcaatcgctgtcatgcctacaatcgcgttcataggtgtacggatatcatggctcatattcgctaaaaattcacttttggctttgttcgcttcaagagccgtctgccgggccttctccaattcattcagctgtgaacgtgttatagagaaataccggaggaaaatcagtgtcaaaataattagaacagaagcacatgacaacaatgtcatgaacatgcgctggctgctcagattatttatggcatcgtctaatatgctatacggcatcaccgatactaaataccactcggaataaggcaatgaaataccatagatttgacattcttcaccatttacttccaatgttgcagcatattcttcatgttttttaagagcagcgttaaatttttcaacaggactttcagctgatgattcattcactgcagaatcagactgtttttgcagctgttcaaagaaattccacagctccgtgttgggattttgtattacaaaactaccatccggcctgataatatgataatacatcagctgcccttcatcttctaaggaaaggaaatcggtgatgtactccagtgggacggctgctaccagtccagtgctcatactgccattctgcatagggtaagcagtagcatcaacgccaaacaataccactagatttccagcaggatcactacctaaagcgactctttgttctcctcgtactaatgcttctacaaagggctccgggttcagtggctgtattgattgtccataaagagtctgaaaatttccctcagtagaacaaagtgctaaatggtcaaagttcctgacctgtgccctgtaaacaagttcctcatataacttttctttattgttattatctgctgagacaacagatacaatgccgctgacctgaccaaaacgcaacttaataacagtttcaaagtggttggacatttgtttattcattccagacatataaatttgaccaatttcgtaaacggtcttttcgctctttcgactcatgtagattccgagcagactgaaaataataatactaaagattaaaagtccaataaaactgtatatcagaaaacgtgttgtagaatccttggttttactatttctcattgatgttattcctccctggaattcttaaaatctttaataacattgatggtttcatagtaatcctttgataatttcggcatcatattgacagccctattccaatcgttttcttttaatgcgtttgttaccaaactactactttcaaacaatctggtaaatgaaagattttggcaaatacctttgagtgtatgaacggctctgagggcctcggaatagtcctttttcaccatagacgcttcaaataagctgaagcttttatcgtccaggaatttaaatacaaatttccggacggtctgttcccgacgcagtctgcccagtacctcatcaaaatcgccgccaaattttaaatagcaatctttcaggttcataatcacttttcctccgttttagatattgtccgcgatgtctttattctcatcaagataacatatagtcactttgtttttcgtgttttttgattgatacatcatactgtctgcagccttgaaaagtccttttgcagttcctgttccatataccccgcctatacttactgtcatatgtaattcgggatggccgtcaatgatcagactatcgacagaataccgaatcctctccagttttttctcaaatatattggcaggaatactaaaaaagataattacaaattcatcgccgccatatcggatcacggaatctgtctttcgcacacaggataagacagtttgtgcaatgttctgcagtacaatatcgcctacgtcatggccgtaattatcattgatatgcttaaagttatccacatctattacgaccatcgcctgaatattatctgagccttgaaaatgctcgtcataataacgacggttatagacactggttaatgaatcaatatataataattgcaggtgccgctgtttgcgggacaggaaggtatatttttcataggaaaacaacctgtcgtagtctattttatttcttatatcctgaatatttttagtcttctgttcaggggaattatcagtcagctcactttccagcgtatccgcaatttcttgcagacacagtaaaagagtcggattaaatgctccgcattgtccttccaaaatcatgttcaaagcttctttatgtgaataagctttcttataacaccgctcactggtcagggcatcatatacgtcggccagcgcgaccacctgggcggctatgggaatttcgtctcccttaagcccgtccggataaccatttccatcataccgttcgtggtgccaccggcaaatctcagaagctactttgacaagcggagcctcctgctgctcaaagggcaggtccgacagcattctggctccgaccatcgaatgggttttcatcacttcaaactcttctgccgtaagacgtccaggtttattcaatattgtatcggaaattgcgatttttccaatatcatgcagcgctgaagccgtactgattaaagaaatatcagctttggacaaaggatattgatcagtacacctgacaagctgctttagcagatacttagtaatcgtattgacatgcaggatatgtaagccgctctctccattccgaaattccacaatatgagacaggattgaaatcatcagcttattatttttctcctgctcatggaattgttctgcgataattttctcaagacgctgctgccttgcatataaaaacatcgtattggaaattcggcgctgtacaatggtcgaatcaaaaggacggctgatatagtcaaaagcgcccaagtcgtaagcccgctttatatttgcgggggaatcatcggcagaaatcataataacggcaaaggtgtcattccagtggtatttgtttatgtaggctaatacttcaaatccatccatttcaggcatcataatgtccagaagcagaagggaaaaatcggctctttgcctcgagagaagagaaattgcttccacaccattctcagcctctaccacatcatattgctcttccaggatatctgctaaaagagcgcggttcatttctgaatcgtctgcgattaaaattttttgtttttccataatactgaaactctttcctaataaatttacggttttattataaatgttatccttacattttggcaacattcgtattggttaggtgtgcaaataggtctcccgctttcttattacttactgacaaaattattccatcatgatataattcagatagataggaggcaaattatgaacccacaagaaacaaaatttacatttgtatataacgaaattaagcagtgtattttagagggtaaaatacttcctggaaatgccttgccatcttcacggctgtattgtgaacaattccatgtgagcagatatacgattaaccgcgtttttaacgcattgaggaaggaagggttggttgatattcagcctcgccttgcaccgattgttgtttcaactattgatgcttatgattcatcaaatgctgttttcgagattttaaaacaaaaggaaggtattttacaggtatatcagacttttgccttaatactgccttcccttatggttttttctttgcaaggctgtgatgtggaggtactacctcactataaacaggctatgaaagcattgcgtttaggatatgccgctggtggatggcgtcctccttctaaattaggatatgatatattaagaataggaggtaattccctattcagcgaactctattctacgtttggtctctataataagcttacattttttgcagaggtgtgcccctatttctctacacactttttacaggaatctgtatctgcaaccaatgacattatggatatattaaaggtcaatgaaccactcacaaggtacaaccagctctcaaatatgtatcaaagacttacggatgccattcaaaatacgttaaattacctgtcagagaccaatcccaaatgtcctgcacaaacgggtttgaagttttcgtggaatcccatgcgtggtcaggattattattactcaaagattattgatgatctgaatctgaaaatcggccttggagtatattctgttggagtatatcttccatatgaaaagcaactggctaaccagtacgatgtctctttatcgacagtcagaaaggcattgtcagagctcgaacaacggggattcgtaaagaaattaaatggtaaaggtactatagtcatagaacatgatgatacaaaacttcatcagctggctcttaattctggatacgtagaaaaagcattacgttatcttcacgccttgcagctaatgatattaattattcgtccggcggcgttagctgcagcagtacggtttaccagagaagaattggacgagttaacagacagatttgcttcaccaggttctattcatttagcagatattctagatgccatattgaaacatatcacgttagaacctttatatgttatactatccgaaaccaatcaccttcttgaatggggacatcattttgcttactatccatccaagagacatactctctccaatctgaacaaaaaagccattaccgcacttcggcaattatatgagggaaatgtaagttcctttgcagatggtatggctgattgctaccgttatattttgattagtatgaaaaaacacatggtagaaaaatataagttctataatgtagctaatattcgagttccagaatcttttgcttctttcaatagcagacattaaatacgatggcttataatcttttgaaataaggcgaccgcaatccctctggctttagacggtggggagttcaccaaggtcatggtgctacgaacgatataaagaaaaattgggagcagtgtcgtaaacctcattgtggaattacttctttttttattaaaagtaaaagccttgatacaaactaggtaataaaatcgttaaaattatcgacaaaatagtaacttgaaaatcatgatttctcgttgtataatataaaaatgcatacgctattctttgccaccgggtaaagaatgtaagcaccagactttttatcattaggtctaagaagatagaaagggttggtgcttccttttgttccaatgcttaaataagattttatcaaggagaatctaggatatgtttagaaaaatgagaagaaataagcaacttttatctgcagaagaaaccattgatattctcactaaaggaacctctggggtgttagcagtacaaggcgatgacgattatccatatgctgttccgttaagctatatatactatgataataagatctatttccatggggccaaagtcggtcataagctggacgcaatcaggaaacagcccaaggcttctttttgtgtaatcgatcaagattctgtcgtgccagaggaatacacaacctactttagaagtgtaattgcctttggaaaagttcatattatctcagaagaaagtgatttgcggtatgcaatccatgcattagctgcaaaatttcatccgcacgattcaaacgaaaaccgggaaaagacgattgaacgggaatggaagccattatgtatgtttgttttagagattgagcacatgacaggtaaagaggcaatagaactggtcagggcaaagtaataacactaaaccactatggcgtagaaagtggtataaaaaggctctcccctttctacgattattttataaaaggcgggtcgtttttccggcacccgccatgattatattatcctcatttttcccgtgggcatggacgctgattccatctcccatcttcgaatcctactctatatccgtcattaaatcctgctctatatgcttgacgtctttcattcacacaggggtcccaattgtttccccagttattttcccacccccaattacaacaccacgggcagcaacatctatgacagcaacatctatggcagcaacatctacaacaacatctgcagcagaacatttttttacctccttaatagtttgtactatataatatgaggaaggtagacaacgtgttactatcatattttttcatattttattgcaacagaaatatcattagcaaatcatatcaacatacccttctttgtatttttctgcggcctgtattgctatctgctcagaattatagcaatgccattctgggaataccgattatcttctgccggttagaatgcttttcactggaattttccttggtaactggctgaagttatgtatcacctcacacttatcagccactacaatcccatttgttacccatacaatactccctactatacattcaagtgctatcagcagttcaaaaactctaattatccaatcatttttcccggaaagctgcaacaaccaggcggccatcttctttccagtagctacatgtaattaggaataataatggagcactattgtctgaaattatgtgattttcatgcaatcctctctttattagtacatcaatcaattcctctcttttcatgcttccaaattcagcatcagaaaacaggcccccctcttcgctccattctatttcttctgcatagaatacggaaaacacccggtattcccgatgctcatataggttatctaattgaatgacccgatgggcgttccaaaacggcttcctctggtactttagtaaatcggcaaacattgtcccatttctcatattatgaccatatacaaaaaggtcccctttctcctgcaggttcccccttcccacaaaaggagttcctgcataggaatcatggcctttaaaatcccggtgtaaataacattccggttctcctagtgtttgcatgattggatagttaatcgcagtatcatcaattacaatccagccagcaaaatcaggattttccaacaccagttcctgatattccggtaggattttcgcctctttatcttctattttttcattgttagccatagttttgatggttttattatctattccctcctccaatacattcttctttttttcttcaatataagccgctaattctacaaatgcctgctgctccaaatataactcctgccatttgcagtccaatagaacagtcaaaaatacaacaaagagacacagtgtgaccataacaatctttttcatcactccagccccgtccccaaatcatcttcccacaaaatcctggaaaaataaataaaccggccattccaccagcggcagattcggtttctggtgagatagtcctcagtccgaagttctggattatccctctcccatcccgtagcctcaaaaaactcgtccgcattttcataaacaaaaatcgccctccgggcttttgcataatcttcatcctcaaatgagtctatatgtatgaaaaactcccgttccaaaagaaatttcaactctttcttttcaaaagttaagctatcattcatctgtaaataaatcctccactttctctattattcccagtttccgctctgtcggttcctcctgaatgtttttttcattagccttgctttttccaacttcttgggattcatcttcctttttcaaatccttcccagaccagattccctgttcaaatccggattcctgctccccgatatcctcctggcggaccttactatcctgttcagctctcagttcctcttcccgtctccattccggtacatggcaatccgttttttcctgaataagcttttttgcatctggatgcatagtataatccatcttcctgacacgcagtatcctctgtccacgaataatcacaagtgcctgatcaagaggaaagcgcagtatctcatctggcaaaagcagcatcctctttcccacagaactggtttctgaatagtccggcacataattgctcattctcaccgtatttaaattttttcgaaccgaggacacgctcacggttacttcaccggaacgattactgaaatacatggctgtagtcatatcattacagcctaaaaacagggacatgtcacagcctcctaatatctcctcccattgtccatccggataccggttttggagttgtggtatattttgatatatgatactcataccaatattgcggcccctggccgttgccagcttttttttgaaatcaggcactataccgatatttggaaactcgtccaaaataaaatgcactggcaccggcaatttccggttcttctggcggtcagcataccgtatcagcttaatgcagagaaaagacacaaacagcgtagccaaaacatcataggttgaatcctggtcagaggtaatacagaaatatgcacacttttcccgtccaggcagcgttaaatcaatttccttatggctggtgattttctgcaccttttcattctgcataatctgaagccgggttcccaggcctagtactgcatttcccttcaccttttcagctttggcaaagagtctgtatggacccttggctgggtgagaagtagggagccggtcaaaaatcccatctatcgcttccaaactttggttaattaaaatcttataactctctgcaaaggttctatctttatctttgtactcatggtatacataaagacagagcgcctttaataaatccatttcaacattgtcatagaaatgatcgaatttgtctgtcgtgttgcggataactacgtcaacaaagatatcaatcagcccgccctcatcaatttctgccaggcaatcccatgcatcggaattttcaaggtcaattaagttccattgacggacagtatacctctgtgcctttaaatatgcaaccatatcctcatatagttcagacttcggatcagtgataaacatactctctccccgcctggcacactgaagaatcatgtttctggcaaatgccctggacttcatcgacccctgggaaccacacacggcaatattgcggttcagcttggaatccactggcagacttagaacattaccactcatcatctccaaaccgaaaataatgccctccaccttcctgatatccttatcctcctttaaaacacgcctccgttcagcgtcctccatatatccagctgtcccataagttcccagctttgagtaagtgaaattacgttccttatcctctccactggtatcgcttatacttccttgaaatactactatcccggcaaaagcaaagaataaaaggattgtaaataccgttgtttttatcccatggatagaggataccgcaaagtatagacaccggataggattcaaacttatatgcccggcgtccaccatgaactggcgcagaacccctccggcataaagtgccaatataagcagacacaacagccctgcgatgagtttcttcctatttctttgttcttcattcattctgtcccttccttatactttattttttgatgatacttaaccaggttcccgtaatacgtccctattgtattgacagaattatacaacgccgttaccataactgcccggatattcctggcttttgtttctgtctcccgcaaacaggtcaacacatactggatgtggaacatatttaaacgcctgtactgctccttcaccagttctgccggcttgtcttcccgatttacccggattgtatctgctgaagagaccagaacctctactgccacctccaccaattcctctaattcctctaactcctttagatcccgtcttaaaatttcatattcaatctgatttttaaattcctccttcaccttcagatatgaatagataggatattcattgttgtaatctttgtatgtaatctctgtatttgtctctcccaattcagagacagatctcgcttttttggatatagacgccccattccaatcggagagaccttcctctgatttcggagacacgtctcccttaaattggggataccctatagtaagtgttccttgggctttcttttgactctttttctgtacccgctttacgctctcaacctcttcagcataatcttcgggaaaggtaagcctttcaagtatatctacgtcaagttctataaaaagaacattgggtatggactgcccattgattgtcaaagtacggaaaacacggcggatgactcccagcttttctaattctacaatcgcattagtagcatcccgttttgttattccaaactgatctgccatttgttggtagcttcgctgtaataagtccgccttaaagcgcttccggtatcccagaagctgcccactcccttcatctctcacttccgctgcgcggtaccagtatacaatatcagataaaatcacaatggcaattaagtatggttttcccgtttctctcagaatggtatggtaccaagccggaggaatcacgttgccggtaagcctaattcggctcaaccggtcaactgtcggattccctgtttgatagattggttccatagcgctctctccttccctattccttccagcccagatatcgatacaccttctcaggacgaatagcctcaaccttaaaacactcaggcaatatggagcgcaggacacctgcctgatacgtaaagcagaataccctgccgcctcttcttaacggcagactcataatccgttttacctgccataaatccatcatataacaaaaatataccagattcccattctcatccgcaccagcctccggtgtaaagcaattatcattcacctgttttagcgccctgcataaaaactggtatagccttacttgaccggcttcactgcataataaccttagctggattactgcctcttctagaaaaggaatatagtaataacattcatatacatcatctaaagaaaacaggttccccttcaagccacccatgctggttaagatacgccttactattgccatatcggttcccatcataatagcactgattgttatgcatcccctgtttttgcgcagacgcacctccagccggctccttacattccgctctgtctttggaacccatttcatcagactgtccaacatattgtatattacgtaaaatcgttctgcggccagtactccgcaggccctagaccccttgatttccatatcggttgcctgtttccattccattgtcccataataagataccggagcactgcctttgatatcaggtgtgctgaacggagcttgatggaaaacagggaacagttccgttttttcactctgaaaaatccgtatcccagcatgatgaaagtaaatccataccatgctcatgcgatgaagcctcaaccgcttctctggttcactcttcacatgattggtggagttggctccggacaaatagagccgcacatcatccccataatgaaccagtagatactgtttagctttatttcggagcagataacctctgacaccgtctttactccgaagtttaacttctccctcccgcttcaatcgggtcaaaagcgcagcggcataagattcggaaccgactgcacggccaacccaatctgacggtatttctccgctgactgctataagtaacagaagttcatcttttctatctattttcatatctgtccccttcttcttattccgttttgttccttttcataccctgtcctctccatccctgggtagaatgaatctccccttttttgtctttaggtacgtttttaatggctctcaccaaaatcttaccctatcgaaaaacctgtggtgggattcagatgatttttcgatatgatgtccaggtggtttcttttacaaatccacttaggaaaccggttacgttccatcaaaaaaaggaacgtgcaatcccgttcccccaatgtggtagtatgataagtgtccagatacagaccgctgtctgatacaaggaagtacatacccaaagcatccacgacctgcttttcctctatattgtcatggtcccgaatcctggtttccggcatttttttatcatactcatgaataaaacagaccgttgccttctcgtatacaggaatttccttcccctgctgctgacgctcttcacaccaattctgcagtgccagaaaaaaaggtttatagatatagtctgtatattttttttttacggtggggcagtaacattggaagttctgctttcaatatgcaatcctcatattccacacgaatttcatggatttgtactagtttcagacaataatcctctttgagaggactgttaaatgtatttcttaatacaaatccccgcagccggtctgtcagacattcagcatgttcagaagcttccatcatacaatctaacaatcgtccatactgaaaactggaagcgctacgatcataaagtgtttttacactctgtgcctcagccagtttatcctgtaccactcctgcaactctctgaacctccaaaagctgatgttccaatagctccataatctcaaattcatgtcctttttctataatattcgacctctccaccctctttcacaacacaaaaaccaatgattccaggtacctctatctggctaatcatcactttatcctccaaaacaataatgtgattttcctctgagcgcctgcttttagcaaacataccattaaccagctttaaatcaccaattccaatataaataatatcgtagatatcctgcccacagaaaaacaagattcttactggaaaatcctcttttaccgccagataatggccgtccacttcccgtttatgcatcatatcgattaatacccaaagactttgtattgttccctcgtccttcagcgaatacgcaaattcattggaggcaagaagaccggtatgaggatttctgtaaatctgcctgttctttaaaagcctcgacactgcttttcccgcagccttttcttccccctcaaaaaaatgcaaaagctgttccatataaagaacattatacttgcgtattaccattaatgtcctctcctccatggcctcagggctaacatataccgccatccagttatcctcccatccttccatatgcatggttaccgaatttttcaagccgttcctttaggttctgcaaatctttccgatccgtggtaatcaaatcattttcaagctggcttgcccgaaattccaatgtaagattattactgttcgtagaaatcatccccttccctcgctcaaaatgaacaatttccatccgctccgcgtcagacaaatgaagtagttcttgtactttttttgcttcgtcattttccagattcaggactattttagtttttgtagcgttgataatgccacgaccatattttccctccttaagcgccataaaatccgacaaatcctgtgtcgcacacactgctccgcctgcgtaacctctgattatcttaaaaatctctagaacatattccgccgccagttcattggaggaagcaccaatcagctgccagacctcatccagaaataccatctttttttctgtccggtcctcctttaccttagaccatacatagtccaccgccacgaacattcccactggcaacaagtccccggtaagctctgatatatctaatacaatatatttgttcttcaaatccacattggtctgctggttgaaactggaggcggagccatgcaccagacggttcagaatatttgccagtctcttggtttcttgcctcctaattagttcattgtaaacatcccccaaaaccggcatttctttatattgttccgggttttcagggtcaatcaggctttcattctcatgggtaatccccttttgctgataagtcagtaccaaagcttcatccaggagctgtttttcctcatgagacatatcgggaatcagaagagaaaagaaaatatgtaagtcctggattttcgccgccagttcagaatattccatgaccgccccgtccaggattgcatttgtttccttattttttttcctgatttccattacattgatacagctttttgaagatgacgatatcttaataaattcgcctccgatattggtacatgctctggcaaattcatgtcccttgtccggcgctataataaaaacctgtatgttttttcttctcatccgcaaggccattaactggagcaggaaagttttccccgctccggttgttcccatgatagaaatattcgcatttttatataaggatgaattaaaaatatccacaattaccaatgaactgtttgcaatattcacccccatcaatatgccgtccttgtcagacatctcaaacgaggtaaagggatagcagctcgcagctccagacgttaaaacattccgcttagagcgctcataaatgcttttctcaagctttaacagtggcagggcggacaagaatgcctgctcctcctgaaacaggcaggaaactgtatccagatcctgggcatttaagagcttcctcatttccttagccctccactccacttcctttgcgctgtatccagttacggttatcaggatagcaatataataaaattcctcatttgccgcgagtccatttttcagataatatccggattggattgactctgcgagatcatcaaaatcagtattggtatcggaggcatccttgatttttgagcggttcagccgtattctccttccaatgcgctcaatagttttaaccttatcctgtttatataaaaaaaggtccacgtcaatcccctcccccgcgttgacaagaagggacagccagccggccggcacccggttccggtacctggccgatgggacaaagagatatgtatggtatactccgtccatgattacataattcccatgcctgaaatccagactttcgggcgcaaagtattccgcaactggaatccggccggtactttcctccccattctcgcggatataccactcggccacctgatttaaccgctgggaaagagagactgtggtgctggttttcctgtttaacagcaggtacagcatttccaccgtatcttgtgtcggattatctgatattacaacttcattaccacactgatataaatatttctttgctgtctgtgcataagagtttaatgttgctgcgatttcagactctgttccccgcctgctgtccacagaaaacaccagaaaaaacctccgggttaccgcttcccggtagccgaccgaacgcagaagcttaatataatctttttgaagcatccggcaccgtccatctggctctgcctcaatgtcctgcttcaccgcctcaacatagaggccgatatctgccttttttgagatggattttatctgtagttccgggggagctatctttaaataacctatgtaagaataaatgatgttacgctgttcgctggcgctccggtgcaggaagttaattggcaagacctcaacgatttttacataacggccatccgatgtgtaaatgactccgtcacggattgattcaattggaatttctttagaggctcttgtataaggcaggtcatagaactcctcctgcttcgctgctgtgactttctccctcttctgtttttggggagcattttctccattttgctttggttttcttcttttttgctcctgtatcagtttctttctgactctccggagttcccgcctccaggcttttctttggttttctgtgctttttccctctttcacgctttatcttccctcctctctctgacctttcttttttcctgctctgttctaagcggtatctctcatccggcacagacaggctacggcggcgctttaaaaatttgaaaaagcttgcgataaatgcaaatagactttctccctgaactcccaggatagccaggattataaccggcaccaggactatcatgccgatgtatagttttgtctttcccgtaacactcagtgacataataagcggcaccaatcccgcgagaatcagtgccgtttcaaatgcatttctagtttttatccgcccggaaagaattgtcccctcctcagcaaaattgggcgggattgtataaatatcaatccggttattctcattcattacccgttcccctcctatttatcctgttttcttaaataaaacaggctgccggcacagattaggattaatgccatgccaagaatacccaaaactggtatctgcctccgatccgactctgttttaagcatctcttcctccacggctggttttatctgttcttcctgttttttcctctctattatttcttgtttttcagcttgctctgtcatcagcgtttctgttttttctggaaatttctggatactacctggattcacaaacaccttgcagatagaaatcctgccagcctccacgcaaacagtatctggctctacatggcagtcatattcccgtagttctgatatggccgtgactccagttactttgtaccgctctcccgctagcgacaagttcgctatataaccaacatctttatcaagtgacacagtaaatgcccttcctcctgtcagtccggtaaaataaatggtgactgctccctgaaacccttgaaacacctggcaccggacagccagcatccccttccctgtatctgtatcggtatactcttcatcccacattgtttctccttttgcacccgccagaccatcggcatagcaaactccagaaatgccaagaaccaggctgagtgcaaggctgggaacgaaactccattttgatctatgcttcattccttcactctcctataatccatatgccgccatcgcttaaatccctggcgtatgaccgaattgtggaagggctgtacaggtttccggtcctcccccggcttccagggtcggcaattgttatgtttccgtcactggtcactccggttaatacgataaagtgtccgctgtttcctgatatcgtattctccgcgcagattaccaccgcaagctttccattcttcaattccgcaaccacataattcatctgttcgcgtctcacacgttcatccgacagtccccagttccgggctgcatttgccggatatgcatggctggttccacgtcccgaaacatatcctccggtgtccatcgcatattgcgctgtcagctcaggcgttatctgttcacctgtcagtgtcgaaatcacaatagcaagcgctgtgggaccgcagccagaagtgcgtattgtgcttcccccataggaaagagaggcccagggttcctccccctggttgtaatacactatttccctcacacatccgggcactgtctcatagatgattttatctcctccagtagcaatggtactggtataaataccgccagacgctcccgcacctaatatataatttttccagcttgcggccttaaacagtatatccagtgccccgtccttcccattttgaactaactggaacagcttcagcacgttattaaagctatttgggtccgtcacataacggaaactatatccggttcctgttgaagacaaatgtggattcaactttaccacaatagaatagtccacaatttcaatttcttcttcctcatcgccggaaccaatggtttctgtatgtgttcctgtctttgcccaatcaaaaaaggcgctctctttttcatcaataaaggattttaagagcactttcgatatggacgaatcggtctgtgtgattcccggtatcgtgtttcctcccccctctcccatatatcccagaaccttttgcacataggctggtgtttctccattttggggaatttgataccctgctctcttcacagcgcctggccccgcgttatatgcagcaatcgccaattccagcccattcggataaacagaaaaagctgcgagctgctgtgagatatagttagctcctcccataatattctgcttaggatcgtagggattagtaacgcccaggttcgctgccgtttcaggcataagctgcatgattccgatagcacctgcactggatacacaatttggattaaaatcggattctgcttttgccatagcctttaacaacacttccgacacctgataagtggcggacgcaagcgtaaaatattcatcgtacgcactggtaagactgcttgtccctccccctgtaccgtacccattaaatccttctatctgtttcccgctccaggattcttccatcaggacagccagatactggctcaatctggtttttaggactgtttcatattcatcgtccacctcatatccatcatatccactctggttattatcatagtcagcccggatttcctctactgctttatctcttagggcctcgaccaaaccatatatttctgactcaaaagccggatcagcggcaaaaagagcctctatctgtatttttatgttattgcattctgcggtgcgagcctgggacacatatgcatccgcatctgcaaagccgagatacataaaaataaggctgacagaatttacaagcagatatacaaaaagcaggattgcaagcaggatagaaccgattactttccaaacggttttacttgtaagcaaagcgccgactaatgttccaagcggtccccccaacgcggttcccaccgtggcaccgctggccgcacctccaaccctgacagccccagtggcggcatgtaccgcctgtatcgaatgggcaattttttctgtctgccccgctgcccgaacgattcgggcagccgtttctgccgctttgtcaagcggctcattgctccggtcttcgttcattctctctcctataaaacagccggtcccatttagaccggctgtttgttatcttttttccccttttccgtccgcatacctctttccggtattctttttgttctccggtttctttttcggcgtttgcttcggtacgcctctctcttgagaagtttccttgtatactttctccagacgtatcatgccgttcttttccaaaaccgcttttgtttccggtaaaaccgctggagcttgttccttttccggaagttcgtaataggtttttccatcttcatgtatcgtctgataggctccctgtggtttttcaaaccgactggcatcataacgcatataccgttctccatcacgctccgcaagataagaaccataattttcatcagaactgccctttccggattgaccataagttccggtaccagtttccataactgtaccgctctgcattccgccctgggatacacctttgacctcttgcatactttcagcgcctgagacagcaccagcaccattggaaacactgccacccattcccatgctatggggctgaccttcgtccatggcgccaccacctgccatttcgtttattgcggtatcagtatccgatatgccggctcctgccgtactggttcccggcagaccagattgtacagaagaggccgggctatccaaaccacctgcataatctgcagccatggcttctgctccaccaggcaatgttcctgcatgttcttttgcctgtgcggattcactatcatatgaaagaataccagtgtctgccattcctgcacctggttctgcttcctgcccgccatcctgcattccggtaattccaccagtctctcctgatacctccataccgccacccggttctgctcctacaaagccagaaatattgccttcgtccattccgatttcagttccaaacgcttcttcaggctcatcaagggaggctccaaacggcccatcttttccatatcccattccgggaatttcccctgcctcatcataagagctatccataggtatatcctcatcataattaaagccagggtaatccataccttccctactctccatcccgtcaaaggaaccttcttgtgcatcaaaatcggattcatccggcattccaaagggggcatttgcactctcagtaccaggcattccactgtcaaattcattttcagccccatgccagccaaagtcctcccctggttctggtttttcctcggcattcactccaccattcataccgccaatattggagccattccgcatatcggatataccagccaccccaaagttcggagaaccgcttcccattggaattggttttcctgtgccgaatcccatgagggaggctcccttttcctggtttccacctcctgttctgccaccgctgcctcccatatgaagcagccggcctgccataagaagcgcgcccataccactaaggccgcctccgattctgcccagattcactcccagagaagccatataactatcaagcttcgcggttatcttacaaaacccaatcagacacatggttgccgcaaaatacttcgtaaatccataactgctggacattaagttaccatagcccgaaaggaacatcttcagacaccacgcgtccagtatgataatcaatatctgtccaccaaacatcctcacccatgtggtggtaatattatttgtggattttgaaccgccggctgcaaatgccaatggtgcggtataagaaaagattcccagcaggacataccgttccgccaaaataaaaagcattttaaaatagttccaagctacaacaaaatgcatgattaacaaaagcatctgaatgctgattatatcgatgcccaatacagataccactgcctccgctgctgtcacgtatgctgaaaaagaataaactgtgattgcgcttcccgctacccactggtaaggagttcctacaatattcagaatataattgacaatatcttttgcgtagacaatcatgaaaaggctgatggccgaccgaagtatgagttcaattggctcctccgatgaggttgttatcttgctgaatattcccttaaataactgccagaccaaaatcataagaagaatcataaccgcaatcggcataatgccatcccggtacaaattaccggcaacgccaaacaattcttcaaacagatttaaattacaggataaaatttccgtaaacatactgcttgcgacatccatcatatctatgataaattgggaacacatttctttaatactttcaaataataattctaacagccagcccattttattatcccgttacaggattttacacacctccttgctgggagagcaccagccttttttatacactccatatagttacgcagaaaacatactctttggaataatactttccatataggttacaataccgccaagagtcattagggcggcccaacagataataatacgctttagccaggcacgtgattcatccacggtttttcctgactttgaaaaattcataagaaagagacatactgccgcacacacaactgcacctaccgttgcaattccagcaacatctgtatacacttgctgcatggcggatttagctgtatcaaaaatatctgcataggcagtctgacacctaaaaagcactatcatgctgactacataaaactgtcctgtaagcgccggtatgtttatatgctttttttgattaaacaccagaaaccccgcctgtctgtccttgctcaaattaatcactccttttttggtacaaaaaaagcaaccatcacaatgatgattgccttctctgcatattttacaatttttatggctctccacggaaatattcccatgcataaaaactgatgatatcattataaaaactttgaaatctcaagtcaatgcatgttcggtcccaatatagtccctttcttatctcttttttgatcttgcttaagccgcactttttaactgcccacactctctgccatttctttcgattgtatagtagtaggaggtaatctcaatccgtacataatccgccgcaacctccagaatgcgatgtaccctatccgtccacattagatgaccatcatatcgatagcatacttcttcacccactttaattggtaactgtacgtctcctgcggttatcacgattctttttgcctgcaaattattcttcatcatagcagcctccttctcaactggctaactgatccaacgataatacactcaccttgtcagtataatccaccttttttccgttaccaaaagcaaattccagctttttaactgaaaaggggatagtctttcttaagcggaagtctaatagttctgctttcacttccgtaatcactgtttttggcaacctggaacgaaaaaaattataatccagaatctccgcctgcttgctggtgcctaaattcctcagtttctcatcttctgtcctgatacctttggcctccagtccaactaatattgttccgtcaggcatccagctttttttctgcattgcctgaccgattgacaattccattggttctggattttccatcttaacttcgcttagtagtaaaacacagttatctggatggctcactggttcaagtgtctggatatcaagtttcattttcttaaatttgtcacgtttcatttgattcctcctttgaattaagctctgattcctaatcgctatcctccttctgtattgttgcttttttctgcacaaaaaaagacgctacatttttctaaaaatgagcgccattctatagcttaataaatttaaaacacccagaacaaactgatgctctgattgcttccttcaatgcagaaagaacaaacttttatgtgttacttattcaagtactacataaatcaatacaccattattttatcactacatattgtatgtgtcaatattcattcgcaatatatgatgtgcttttgttttttatctaaaaaataaaagaaaaaggggtgttcgttatgttgaagcgatatgaactgactgaccaagaatggaaccggattgcacccttacttcctcctgaaaaaccgaaccggcctggccgtccatccaaggataaccggacgatgctcaatgctatggtctggattgcgcgcaatggcgctccctggcgtgatctcccagagcgttatggcccttgggagactgtctatagccggttccgtaaatggattgaggatggttttctggacaatatcttccgtgtactcagtctcgaggccgaattagaggagcttagtctggatgcctccattgtaaaagctcatcagcatagtgccggagctaaaaaagggggccagcaagtctgattggccatagccggggtggagcaagtacaaaaatccatgcaatcgtagatgcttatggatacccaatttatttacggttgagtgaagggcaaaggaacgatatcaatatggcaatcccgctgttggaacaaatcaacctgaacggcagccaggtcctggcggatcgaggatatgacagtaatcgtctgattgatattatcgtggtgcttcctgctgaagctggggaaaaacacttccagccagagcagaaagtgaagctgattaacccacgcattaccgcagaggggtacaagattgacacaagagggtttacaaactatatcctgctggcagatgatatgttaccagcagagaataaataaggagggctaaagtatatgagattagcaaacggtatcgtaattgaaaaaaaaagacattcggacagttgaagttttcggcattaagacgtgaggtgcatatccagaatgagggcggcacagtaagcgaagaaatcaaggaaagaacctatgaccttaaatgccgtggacagggacgtatgatacaggtgtccattcctgccactgttccgctaaagtaatttgactacaacgcagaggttgaacttatcaatcctgttgcggacaccgtagcgaatgccacctttcaaggggcagacgtggactggttcattaaggcagatgatattgtcttgaaaggcagaccagcacagccagtaggaaatccacagaaccataataatcagcagttacaaggcaaaaaataaacaactactgttttaagttgctagtggtgttgaatagctgtataatatccctataaattagaatttagcgaggtgctttgtatggaaattaaaaaaatagatgaaacccaatttgattttgccattgacctgatttggtcaacatttctacgatttgaagctcccgattattcagaggaaggtattcagtcatttaaagattttatagataataaagaaataattaaaactttagaattttggggagcatacgataataaagaattaaaaggtgttattgctacaaatgataaccgaaaacatatttgttgtttcttcgttaaagcccagtaccatagacaaggtattggtagaaaactttgggaatatctttgtgaaaatagtcaaagtaaagccattactgttaattcttctccgtatgcagttcctgtctatcataagttgggctttgtggatttggacattgaacaagtatctgatggtatgagatacacacctatgaaatatgagcgttaaatcggattttttttgtagaggtgatattatggaaaaagtaatcttatatattcatggaaaaggtggaagccatttggaagctgaacaatacaagaaaaattgttcggattttgatatgattggcatagagtacaatgactatctcccgtggattgtgcaaaatcaaattcaatcggtttatgacaaggtttgtggaagatacgactgtatttatttgattgcaaacagtataggcgcttattttgcaatgcacacattgcaaaattgtaatattgcaaaggctttatttatatcgcctgtacttgacatggaacatcttatacttgacatgatgagttgggcaaatgtatcagagaaggatttgcgtgagaagggagaaatccctacggattttggggaaacattatcatggaaatatttatgctttgttagggaaaatcctataatatggaatgttcccacagaaattctatttgcaggaaatgataacctcgtatctcgccaaacagtaaatgaatttattagtaatcacaatacacatcttactgtaatggaaaatggggagcattggtttcatacagatgaacaacttgcctttttagatagttggatgaaaaaggcaataggataaattccagtttgcctataacttcatattcaataccacaagcagttagtctatatgattgactgcttttttcatacctagaaaaagggggggcttatggcattttacaaatataagggaaagcgtatcagagccagcgacaagtcacttgtgtaccgtttctgtggcggcatgctcctgttcctgttcgtagcggtcatactgcttttgaacatgggacagctcatgcgtaccgattgggacaaatttagcctaatcagcaatgacgggttggcgttcacgctatccccctacaacttcgtaactattatcgtggcgactggtatctgtgtactggtcgcttttctgtattaccgcttctgctatgaccgatataaacaactcatacaccgtcaaaagctggcacgtatggtcttggaaaatggctggtatgaagcagtgacaatacagggaaatagctttttcactgacctgcaatctagcaagtcaaaagagaaaatcagctactttccccgtatgtattatcgcatggaaaaaggcttgcttcatatccaatgtgaaatcactctggggaaatatcaaaaccagcttttacagttggaagataagctggaaagcggtctgtactgtgagctgaccgacaaactgttgtatgacggctacgtggaatacacgctattgtatgacatgatagcaaaccgcatttccatagaggacgtacaggcagaaaacgggggcttgcgcttgatgaaaaaccttgtctgggagtatgacgctcgccctcatgccttagtgtgtggtggaactggtggcggtaagacgtactttatattgactatcattgaagccctgttgcggacaaatgccgtcttgtatatcctcgacccgaagaacgctgaccttgcggacttgggaacggtcatggataaggtctactacaaaaaggaagatatgtggcgatataggacgattgtatcagaaagaacccttttgacttcaaattaagtgatgttctggaagatgatacagaacctaagattgctttaaccccagaacaggaagcaaacctgctgtcttttatggaaagtgacaaggtttatgaaaagtatcgtgatgaaatcattattctgttggaaacggggattcgtgtttcagaattatgtggactgactgtcaaagacttggatttccaaaataggtcaatcaatgtagaccaccagtttttgagagatacagaagtcgggtactacactgaaccgcctaaaacaaacagcggtatacgccagcttcccatgagcgacaaggtttatcaagcgtttagacgcattagcaagaaccgcaggaaagcagagccaatcgtgattgacggttacagcagtttcttgtttctcaaccgtgagggcttgccaaaggtagcaggtaattatgagggtatggttaaagggctgattaaaaagtacaacaagatacatgaggacaggttatcgaatgtgaccccacatactttcagacatacgttctgtaccaacatggacagaggaatgaacccgaataccttacagtacatcatgggacattccaacataaccatgacacttggctattatgcacatggttcattcatttctgcaaaggctgaaatagaacggttgtctgcatagtagtaaaagctgaatttactacacttttactacttttgaaagcaaagtcatacatggatatgccagcttatgcaatgtatcttccgaaaagaaaacgtcgaaaaagcctgtaaatacaggctataccgacgtttgacaacatttgaaaagataatcaaaattcttatgagtttttgagtttaaaaaactccccacttgataactgctttgtaacattgttttgcaaattaatcgtccctccagctctctcactgagcatcatctcttcttcctgcgtaatcatatcaaataatgataataaacttttctcttgtataatctttctacatgtgtccctattctcaaacaacttaactcacctctcttataaacatattaaaaaggatattacacgtctattacccatgtatcacgataatgttctaatagcattcgactttccatctcgtaaccccacagaataccttccacggcttttagagcactttctctccaccgaaagtaggtacttcgatttatacgcacattctgagacaaatggggttccaacttatttataatctctgttatattgtttggctgataggcagacatataagtataatatagaatccaataatatcgttctccctgcggatggtattttctcataagctctacagcctcatcaatcaattttaaaaatttgttggaactgttgattgcttccactctggatttaatatttgcttcatcatcatttatatccatgccagcctgatatattgactctaaaaattgatccacatccgtcccatactctttttgaaaccgatgtttcacttgtccaatctgcacttgcatacgccaggaaacagaacgataaattttaaataatacagcaacatcatgatatacctgattatctttactttcaatcgttataactccacttttacccattatatttatcctcctttatatcttctacattttggtaaatatatttgctttggagaataattctaatggctggccactttgcgacattctttcgcaaagtgcagataagtgactttatgacattctttcgcaaagtctccatgtattagattaatcgactttgtgactatccctccaagactccagtaagtcatatattacagcttcaatctgcccttttgtatattccttcggaaaataatcccttagtttcttaggggataatgtaatcttcggcatactgggcatcttagagtccgaaatcaatatttctgtcactctttttttatttaaagtccctgctttgctttcatcctttaaggcctctgcctgtatctcattaggaaaaagacgtttatctaaaattactcccagtacccacccctgttcttcagcagtaataaatgataacttttctgcgggtatcagcaagagttttttcaagtccacatattctaaaagttctggcaacaaataagtcaggcgcacataccgttgcactgttcttcctgttttcttcgcgcctttacctattaaatcagcggtatactcttctcctttgactccctgatggcttaatgcctccattttcatccgataagcctttgctttttctgatggcaggagatcttctctctgaatattggaatcaaccataatgatagtggcttcatcatcattcaagtcccggactataacaggcatatcctgatatccagccagttcacaggcccgctttcttctatggcctgcaactatttcatatcctccctgcttatcttttcggacaactccaggaatcagaaccccgtattttctcacactatcaacggtttccatcatcttttcatcatcaaggacgcgaaacggatgatttttgaaggaatgaaggatatcaagagatagatgtataacctggccttcagcgctttgttctattgattcgttaccaaacaagtcattataagaggtgaatttcaccttattcgcactgcggcttcccataagcaagcacctcctccgtcagagctgcatatccatcagcaacaatcccctttggatcatgcaaaaaaatacttttcccttccgcacttgtctctactgctcttaccgacaatggaatacagttttcaaagatatgaatttgaccgccatatgccattctcagcttgtctgaaatatctcttgcaaagttggtccgtcggtctacctttgtcagcaatattccttcaattccaagttccgggttcagctgccggtggacccggccaatcgtttttataagctgctgtaacccctttgtaggcagataggccgcttctaccggtatcagaacactgccggccgcaacaagagaattaattgtcatcattcctaaagatggcatgcagtcaatcaatatgtaatcatatcggtcctttatctcgtctacatactgacgaaggaccgtctccctgctcataacgttcaccagcgttgtttcaagtccggcaagttctatatttgcaggaagaaaatccacaccctcctcgtggtgaagaattccctctgtcacatccagaggttcatcattcaccaccttcgccaaaatatttaccagtgttacctccaggttgtccggctcatcaattcctaaacaggctgccaaatttccctgtgcatctgcatcgattaaaagaacctttttcccctttctcaccaatccaatgcctaaatttacgcatgtagtcgttttgccgactccacctttttgatttgctatggctattattttgttcatgatattctccttttgttctctatagaatctgcaacacatcatgcacagccacaatactccggatatctgagtttcactgcctgccaaaaatacggtgcatagccacaacaaaataaatcttcgaccgtatattttctgcattcagataactgatcgtctgagttctcacaatcagatacgctgggagtaccgttgcagtagagattatatgccattcttataatgtgctggctgccagaagtctgccacccctcatgcaggcattctgttttaacgcaaccagatttaaaatcataaatcctggctgcattacgtcttgtatcctcgctgattcccagacaatagattaatgcggcatggtaggcatcttggtacctgcattgagacaaatatctttcaaaaaagtccctatgggccgcgctcttaaaaatcacattagccataccctctctcatcggtatatctcctttcctttaataaaataaaacataagtatcaaattctctgctcgctttctgaaatagaatatctgctataataactctaaaatatgagtcttcatccattcaagggcatttctaaatatttctttattatgtcactacttaatacaacctatctttatatccgcatcgtatgtgcatctccttttctttgaataaaataaaaagacatctccacatgtggaaacatctttttcaaatcaacaatttattctgttatgataatacttaatttctggtatattcaacttacttctccactacatattgagtaacttcgaaccgctcctttacgaatgaaggtcaccaatccatactgcccatatggcattatctcgtccatacgctccacgcagcacacaatatatagtatatttatcaccaatcataatcaatcagtagtggtttgttttgtttttcgtagtagctcacaaaatactccaccgcattcttcggaaaaaactctttgaactcggaataaagctgggcggccagggttttgttgtgggcaatgataagggtaggcttttgtaattgctggattacgttagccatagtaaaggtctttccagagcctgtaacccctagtaaagtctcgaattggttgccttctttgaagcctttaaccagctgctcaatggcctgcggctggtcgccggtgggctgaaattctgatactaattcaaaatgatccatagtgaagtctcctttatagtatacaaatacgtaaaatgtaactatgttttcataattctatccccttggcccgggttctctctcggccttctttatcttttgattgaaattgacttcctttcttctcgttgatacttcttgatcctgagtcgtagaccaccgatatatctgcccaatgtttccataaacacgtttaaaaagaaatgacgtgccccactgtgttctccggaaaaagctttttgaacttacttcggaaccgggcgggcagagtatattgtggaatgtaataacccggtaaaaaatacttgtaggaaaggtcattaaaaattataacatagacagcctgaaaagtataggcggaggcaggaacatttgttcttttttatccaactgatctttcttaacacgttctgagcagctgattgtctgctccatcttgtcattacggcagcggaaagcaattccagacaaaatatagcagaacagaaaaagccctgtggattgcttttccacagagcttttccacagagccttcccacagagctttttcataaaactttttgataggcaacgcgccaagctgcacataaaccttccggattcccttttgattcataatcctagaactatctaatccatctccgcagtgtttccataaaacgctccacttcaatgggttttgccacatggtcgttcatgccggcgcagtgtgcctttccaatatcagtggcaaaggcattggctgtcagagccaggatgggaaccgttctggcatcctcccgcgtcagcgctcggattgcttcagaagcctgataaccatccatcaccggcatttggatatccattaaaatacagtcatattcttccggcccggaagacgcaaacttctccactgcaagccggccgttctcagcctcgtcaatcagaaagccatgcatcttcagcagctccacagcgatttcacgattgagttgattgtcctccaccagcagaatccgctttccttccatgatggtgtaaacttccccgccgggaagcgatgaggcatcggtgcgcccctcccggcagaactggtggaaggtatgggcaattttggatctgaaaagcggtttggtgataaatgcgtccgctcccgccatcctaaactcgtcctcaatctcggagtagtcataggcggataccacaatgatgggaacatccatccccagcttccttcgaatcaccttgagcgtttccagtccgtccattccaggcatcttccagtccaaaataagggagaagaagtcgtcctccgcctcatgggcttccacaacgcggcgaatggcttctttgcccgagagtacccagctgctccgcatccccagatcatccagaatctcggcggcgctttcgcagataacctggtcatcatccaccacaagtaccggcagcccggagagctctgcattgttatcctctgcctcttcgcacagcttaaaggatacagccacaataaactggcttccttctcccaggacgctcttaacctcaatcgtgccattcatcatgctgacaatattctgggtaatagccatgccaagacctgtcccctgtatctggttggtctttgactcctcggtccgggagaaaggttcaaaaatatgagggatgaaatctccggacatcccaattccgttgtcggtaacgataaattcatactgccccttgccctttgcaaaagccggaatttcacggaccctgagacccacactgcctccctcaggggtatattttatggcattggagagcaggttcaccagaacctgctgcaggcggttctgatctgttaccactttttcatgccgcacatggtcagcgttaatctgcagctccaggtgtttttccgcggccagaggcctgaatacatccataacgtcctcaatcagctctggcagcgaaacgttctccgaaataagatcgattttcccgctttcgattctggacatatccaatacctcattgataaggtttaaaagatgtcggctggaaacattgattttattcaggcagtcttgtatcttttccggagattgcaggttcgcctgcgcaataaccgccatgccgatgatagcgttcattggcgtacgaatatcatgggacatggatgaaaggaagttggtctttgcatcgttggcgatttgtgctgcctggcaggcatcttccagggcctgcctctgccgggcctgctccgtgcgctccgccgtgacgtcaataccaaccgtataataggagggaataccgtcccagttctcctccccgctgacatagctgcatgtcatcagtaaaatcttaaccttaccgtcctgagtgaaaatgcggctctccaccatagtgggcctgccagtctccctggactgcagcataacagcagcaacgcgttccttatcgtccgggtgtacataactgcactgggaatgcatctcctgctcgaactcttctttcgtatatccaatcaggtccaaaaaactgccgctgtaccagaggacagtccgcatatcccgtccgtccacccgcgccagcccgccggggacgctgcgaaccaacgcatcccgctcctggtccttctttgccagcttatattccgtgctgtacatatcatgggaaagctccagccgcgcccggtgtccttcccagtcgataatcctgttcttaattcggaatgtccgctccaaaaccgggttctggaactcccactcgtaaaattcattctcggttattttgctgttggtacagaacgggcagggactcgtccttccctggattacttcataacacttacgccccgccgctttcaccgccggcatccccagtacctcgcaggaatgctggttcacatacagcagctcataggtgtccatatcgctgatatatgcattgccctcgtatgtatccagcataaaatggaaatactgcagcttctgccggtagagccgttcctgttcctctttcccggcagccagggcatccactcccgcaagctctgcctgcaataccttcccgcccgctaaagaatcctccctgacggtcccataaagatgtttccaggaatatccgccctccttaaggggcagacggacagtcagttcaatatcctgcctttcattctcaaccgcctgggtcagttcctgccggatacaggaaaacacatcgggcatcgctgcataatactgccgcagtgtggaaaagaggccgccaaaacgttcagcggtatatccaataccactgaaaaagctggaattcccccatagaaaagtcagatcctcgtccagcaggcaacatattatacctgttctcagagcttccaggactgccggacacttgattactgtattttcagctgcatgtgcgctgtcctgctctgtcatatctcccataattcaaccatccattccaaatctaatctgtgagaatcaatttcctttatattatataatcgcggcttctcaacataccgcgggcttctcaaatatattatgtaagtatagcaaaagccgtagtaaatagcaatagcctgtctggaaatgcagacagtacaaaagccccagccataatagccatgaccggggccctgttccacacttcttatttgttttccttcaacacctggactgccttctgaagctggttatcttcctccggcttcaccactgcctgggttttaagcttctcatccagttccacttccacatccggttctattccctttccgtgcaggtcaaaaccgctgggcgtgtagtaatgggctgtggtaatcttgatggcggaaccgtctcccagaggtatcaggttctgtacaattccctttccgtagctggtggttcccaccacggtggcccagtcataatccttcagcgcgcctgtaaacacctcggaagcgctggctgagtccccattaaccagaatgacaatgggcattttcagctcatgaccgtctgaggcggtaaatacatcgcccttttcattcttgtcggccgtgtaaacaatcagggtttttcccttgcccttttcatactggtccaaatcatcggggagaatataatccaccatcttaacagcgctgtccaggactccgcccggattgctccgcaggtcgataatcagcccctccataccgtccttctgcagctcatccactgcctgctcaaactgctccactgtaatcacatcaaattccgagactgcaatccggccgattttatcgtccagcatgctgtattccacagtgggcacttcgattttgcgccgcgtaacggacatatccacatactcgtctttgtctgccctgtacaccgtgatagccacatccgtgccttcttcgcccttgatgtaattgttcaccagcacatccagactttcggaagccaccagggtatcgcccaccttatatataatgtccccgggctgcatccctgcctccagggccggggaaccctcgaacaccttcacgatggtacataaccccgtggttctgttctggcttaacatggctccgataccggagtaggttccctttgtgctgtcattgatggaacggaaatcctcctccgtataatacgtggaataagggtcatccaggccagccagcattcctctgtaaataaaatcctccacatttccggcgtcctcgtcgtacaggaagtgaagatctatgatttgctgaatcatggacatcttggccgtaacccggtcaaagtccacgccgccttcatggctgcttccgtctgtgattcccggtcccttgccctcgatggccacgctgggctgacggctcataacccgtttaccgaagatatagatgccggccgacatgcccaccacaatcaatcccacaaaggcggttacaagggctcccaccagagccccggcccagaaccggttctttcctgagccgttccggttcccgtcctggggtcccggtccgttgtccctgtagggaccatccggctgcccgcccatattatgttcctgtctgtcaaattcacgattttccaatttacgtctcctatctgtccgttccctctatcctatgacaggtcacgggcttacataacttcggggatttacataggtgccccctgagcggattccaaaatgcaggtggggaccggtggaataaccggtggaacctacttttgcaatcacctggccttttgtcaccttttcccccacgcccaccagcagcttggagctgtgcatgtagaccgtgctcaccccgcctccgtggtcaatcataatataattgcccgccgaatagctgtatgtagatatcaccacctcgccatcagccgcagcaatgatatccgcccctgtgctggcactgatatcaattcccttatggttgctggatgccccttctgtgggagactccctgtctccaaaattagaggtaatcctgctgctggacggacagggccacttaaaactaatattccccaaattcgatacggtatacgtcttgccggctgcttccgccttttttctggcttcctcttccctccgcttcatctcggcctcgattcgcttcatctgatcttcctgggctttgatgtctgcattgtactggtccagctcatcctgggccatggcaatcttggaattataggaatccagctctttctgcttggaatccatcagctgctgcatggaagcctgtttggcctgggtggactcctgaagcaccaaaagctccccatgctccttctccaggttctgttctctggcagccacctgctcctttgcagaagcataggctgtcagcatcttcctgtcatattccgcaatctggctcacgtattccgcgcggtttaacagctccgatatgctgccggactccataaccatatccagcagattgttctggccgttctcatacatgtacttgatgcgcagcttcatgctgtcatactggtgctcttcctcgcgtctggcctcctctaactgtatctgggcctggtctatctcctcttccttaagggtaatccggtttcccagctgttccagctcctctgccagggaggacagactgccgtccagcttcttcacataagctgccgtatctgcctttaatccctccagctggttcagggtactctccaccttcttcttttcctcttccaaagcagatacctgtttcttggcatcctctatctccacactggtggcgtaggccgaaaacgccgccataccgcccatcaaaagacctcctgacagcgctgccgcacaaatccaatgtcttatcctcattcacatcctccttccctataccttcaagtgacggtggatggtaaaataactgacaaaaaaaccaatgcccacacccaggcacccggctgttgcagccatatagggaaatatatttcccagaggtattggttcaaacatgcctgtcagcatctgataatgctcactgatatagatgaccgccctctggtaaagcgcatacatgcctgccagcggcaccgctgctcccaaagcgccaaggagcacgccctccaccacaaaaggcgcacgaatcatataattggtagcgccgattaagcgcatgatttcattttccctcctgcggaaggccgcggccacggaaatggtattgctaatcaggaaaaccgccacggccagcagtacgcagattataacggccgacatggccccaaccatctttcccgcgctggtcagcccggccacagccgtactggaatagcgcacctttctcacgccctccatgccttccagacgctccacgattttatcctgttcctcaatattattgagaaatatctcataggaggcggaaccggacagcggattgtcgtctgcaaatccctctgccagctcctccatcccctcaaaataatctgtcttaaagttctcccatgcctgggcagcggatatgtactgcgcctcccgcacctcttcccagccccggataccatcgccggcagccagaatctgctcctccggcatatcctcatcaaaaaatacagtgattcccactgttgtctctgctgtctttgccacattctgcacattggctatcagggcgaaaaaaagacagaataaaaaaatacatgcagaaatagtcgctatagatgccagcgaaaacaaaatatttctgcatatattaatgatgccctgtttcaggcaataccaaaatgtactgattctcattgctgttcatttgcctttccggcggaataagcatacccgtaagctctccagagccgctgcggcagcaccctaataatatccgcccacatcactgataaccgacccccgttccatggtaatgatccgcttgttcatctcatccaccatttcctgactgtgtgtaatcacaatcacagtagtccccctctggttaatctcctccagaagcctcatgatttcatgggtattaaagctgtccaggttaccggtgggctcgtctgcaaggagcacctcagggtcattgatcaaagccctggcgatggccactctctgctgctcgcctccggacagctgtctggggtaggccttgtacttggacgacagcccgaccagcctgagcatctccggcactgtttcccggattatcctgggcggcaccccgattaccctctgggcaaatgcaacattctcaaacacagtgcggtccttcaggagtctgaaatcctgaaagaccacgcctaatcttctgcggtatttgggaacataccttctcggcatccttcccaggtccatatcgttcaccacaatacgtccctttgtgggttccagctccttgaggagcagcttcatcagcgtactcttgccggaaccgcttcttcctacgatgaacacgaactcaccgtcatcaatggtaagggatacatccttaatggccttgttccctgtctcgtaggttttgctcacattgcttatctctatcatccaccgactccggcctaataatccaggctttccatatacttcatatacttggcaaccatcagggcaatcttaaaggtgatggcgtcctcaaaaatgcgcagatctaatccggtgctcttctgaagcttatccagacggtatacaagggtattcctgtggatataaagctgtctggaggtctcggacacattcaggctgttctcaaagaacttgttgatagtggccagtgtctcctcatcaaactcgtccggagacttgccgtcaaatacctcgcggataaacattttgcacagcggaatgggcagctgataaatcaggcgtccaatacccaggttgttgtaagcgataacgttcttattggcatagaaaatcttgcctacgtctaacgccatcttggcttccttgtaggaacgggaaacttccttgatgtcattgataatggtgccgtatgccacccgcacctttgtcatggcctcggtgttaagcatatcaagtacggtgttggctgttttgtccagctccccgtaggtttctccctggcgtacttccttcaccagaataatgttcttctcatccacagctgtgatgaaatcctttgtcttggacgcgaagaggcttctcactgtctccagtgcgttgacatccttctcgttgtgggtctcgatgatatagaccacacgctttacatccgtgtcaatgtgcagcttctttgccctgttgtagatgtctaccagcagcaggttgtccagaagcaggttcttgataaagttatccttatcaaaacgctccttataagctaccagcaggttctgaatctggaatgcggccagtttgccaaccatgtatacatcatcgctggccccctttgctaagaggatgtattccagctggtgctcatcaaacaccttgaagaactggtatccctggataacctggctgtccgccggtgaatccacgaaaaccagaaccgagctctcggagtcttccgcatcggtaaatgtagaagccagcacttttccctctgtatcacatatacccaaatcaattcttgtaattgcctttaatccatccagtgtggtttgaagtatctgatttgaaatcattctatactctccttttcaaacgtattcggagtaactaatatccctattttcatattttaatgcaaaattacaaaaaaagcaagagagttgtatactctcctgcttctttttaccttaattttcacttacggtttgtttgtattagttaagaacaaccagttccgtatccttgtcgaaaatgtgaatcttctctaaatccatggccagcttgatggtatcgccaggccttgcggtggtacgtggatttaccttggcaacaaagttggcgtcctcgatatcaaagtataacagaacctcggagcctaacatctcgtatacgcggacagtggcctcaaatacgctctttggagacatggccaggtaggattcctcgtcgtgaaggtcctcgggacggatacccagggtaactacctttcctatgtatccggcgtcctctaacttcttggacttggcctctgaaagggctacggtgtgtccgccgaagcttaaggttgttagagcgccgtccttgccgacggttgcatctatcatgttcatctggggagctccgatgaatcctgccacaaacttgttgcatggcttatcatacagattctgtggattatccacctgctggatgatgccgtccttcataacgacgattctggtacccagtgtcatggcctctgtctggtcatgagtaacgtagataatggtggtctccagtctctggtgaagcttggaaatctcaacacgcatctgtcctctcagctttgcatccaggttggacagcggctcgtccatcaggaataccttggggctgcggacaatggcgcgtcccatggcaacacgctgtctctggccgccggaaagagcctttggcttacggtccagcagatgctccaggtcgagaatcttggctgcgtcatgcactttcttgtcaatttcatccttcggcgtctttctcagtttcagaccgaaagccatattgtcatatacagacatatgtggatacagagcatagttctggaataccatggcgatatctctgtcctttggttcaacgtcattaaccagcttatcgtcgatgtagagttcaccggatgagatgtcttccagaccggcaatcatacgaagggttgtggacttaccgcatcctgaaggacctacgaaaatgataaattccttgtcggcgatttcaagattgaattccttaactgctacaaatccatttggatatttctttgttacgttcttcagtgataaactagccattctgttttttcctcctaataatacgcttaacacatatgtgttttaccctcttttgtaactgctcttataatacatgaaaccccctggggaatccatatcgcaaatccacaaaatcaaaattggggttttagctaatttgtatacggggaaaaaaaaatgtcctaaatcacaaagtattccaatatttgccgccaactttttgttaattatgttaatcaactgcgtttttcccgaaaatatcggcaaaagccacaaaattcagggcctaatattcgataaatccttcaccaaatacctctctggcatcacttacaataacaaatgcgctgctgtcaaactccgccacaatctcctttaaccgcacaatttctttcttcgaaaccacacaaaacagcatcttcttttcctggtccgagtacatccccctggcctccaggctggtcactcccctacccatctgttccatgatggcctctgcaatctcccggtaatgctcggagataatataagcctgtttggaaaacttaagcccctctatcaggccgtccgtgaccttagccacacagaaaatggcgataagggcgtaaagagcgctcctgatgccgaacacggaggcgcccgccgccacaatcaatccgtccagcacctgcatgatttgggccagggtatagtgcttaaggcgtttctggatcagggccgccagcaaatccgtacctccggttgtgcagctggtcagaaacaccaggccggttcccacaccgcttatgattcccccgaataatgctgacagaaacaggtcatttcccagataggacgcctccggcagaacatacagggaaacagagagcatgaccgtggcgaacagggtgcgcttgataaaccgccagccgcagaaaaagaatccggctgcaaataacgggatatttaacactgtattggtcagccacagaggaacagaccacagttccttggcaataatggccacgcccgacacaccgcccgtaaccatgctcacagggtcgtaaatattcttgatggcaaagccaatcaggaatgtccctgccacaatcatggcataatccgccgccggattcctctttttcatgtctccccgtcctttccccaacccatgccccatgtaccggagccggcctgcaccgtctgcaggcacaggcaatccgttcctccggcacattttatgctgtactaaaaagtatgtgccttccttccccattccatacgcttatacacgctcaatcgtcttgtccgtaatacgaatcctgccttcctttaaaagcctgcccacggcccgcttaaaggcatttttgctcatactgaactcgcgcatgataacctccggctttgccttgtcattaaagggaagcacgccgtcgaattcgtccatgacctttaataccttctctgcgtcagtccccatctgcacataggatttttccctgacgcacaaatccagttttccgtcctcgcgcaccctggtaaccctggcctggaccgtatccccctccctgaacctgccgtatagctccttttttggaataagtccgtaatatttgtggtccaccgccacaaaggcgccgatggtttcattgatttcatagatggtgcccgtaacccagtcctctgccttatagggcgactggttgctcatatgggaatagacgcgcatggtagctgccagacgtctgctcttatccacatacagggtgacaaggcactgctccccttttcttaccgggtgggtctgctccttaaacggaagaagcagatccttctccagtcccatatccagaaaagctccgattttagccacatccttgacctccagcttcgctgtctcgcccacctgaagtttgggctttcccgtggtggcaatcaggcggtccgatgaatctttgtagatgaacacctctaccttgtccccgatcccggctccctccggcacctgcttttttgggagaagaacagctgcctcatccccctccttctcagccagatatactccgaattcttttgtccttattattacaagctcctgcactttacctaattcaatcatctcaatcttcctcctgtccttttgtcctcagccataccacagcgcagatttctcctgtactgccctcaaggaccactgtccactccctatcccgggccacgcttacccgcggagtcaggacatctcccaatacagccgcctttttgtaatcagcccgtatctcctttatcacaagcccctccggtatggcctccctggccatttccacatactgggcattattcacatggtggtttgtgtcaatgtggtgtctggcaaccacaataggctcacccgctttgcattcttcaggcaccggtatcttcctggggcaggggcttaataccagccttggctccggctcgccgtaaggagccgtatccccgggccgcacccggatcggaatgttcttatccgtatcgtagaggaaccacatggattcagccctgaccacgtccgtcccctccccgtcccgcagaacgaagttacggtagccgtatatcccctttgacgcacaatgccatgttccaaccaccagcttctcccccagtccgggataccggtctatcataatctgccaggatgacaaaagccatgctttatggctggcttccagataccccactcccacaccgcagtcctctgactggaatgtgctgcagtcctgcatgtagttgatgatgcctgaaaccgacaggcaccctccttcatccgtttcgctgtaacggaccctgctgttaaatgtatacatatttacctcattctcccgggaccaggacgcagcctttgctaccggcgcttccatgccccgccccggtattacgcccttcattgtatcataaattcccttgggtatacaagcaaaatcccacagactttcatctgtgggattagtagctgggctacaaggattcgaaccttgaaatgacggagtcagagtccgttgccttaccatttggcgatagcccattgttagttcaatattctaacacaacttttgctatattacaatatctattctatcgtttccataaatttaattttcatatattaaaaatatgcacatccgtgagagcagattccgaagaacctgccctgccataatccttcattccgcgggaaaatcaactgtatggggaacgaattccccatacattgttcccggccttcctaataatgtccgccgtcttttctgttttcatccagatcgaagcgtacctcatcaaaatatatctttgtctgtccccagtgttccttttctggccaggcaaaggggtgcagatgttttgcccgctttgctgtttccagagcttcctcttctgccttcagaaggatctccctctcattgattcccacggccttgccgtccctcagccggatctcaccatccaccaccacaaggtccacatcggaggggtgtccgtttccaatcagggtttctatcaggttaattctcggcataaggcggggattcatcagatcgattgctataatatccgctcttttccctgtttcaagggaaccaatctcctcatccagtcccacacaccttgcagcgtcaatggtggtcatctccagcaccttctccgccggcagataataatcatcattcatggcgcggcggaagatcatctgcgcccgtttcatggcgtcgaacatgtcaaaaccggatgtgagcatggaaccgtccgttgtcagggccaccgtcactcctaattccagcagctcaatcaccggtgtcctgtttaccaactggcgcattcccggcgccacgctgatatgggtatctgtcttctgtatgatgagcgcttcatcaaacgagaggcccgtacagtgctgcagatggacatccgggcccaggagggcattttctttatcctggtaagccagatggaccatacccccaaaggcatctgtatgaatacgggtattgtatttttccgcaattctcctcatgtccctggcctgtttcaggtcatgctctgtaagcttcacacagcggtccgcagaagtgggggcagagggatccacggaggtgactgccccaaagggagcaacgtaagccctggtccggtcgctgttggcatgattcagctccgacacaactgtctccaggctttctaacacagtctcatagctaacctgggacatatgcctctctccgtcctccgtatagcggctgaatcggtgaggccacggcacatggcagggtcctgtgcagacaatatccttaacccccacctctgcgtatgccctggcgttgttaaaggcgggaacaggggagtcacagcgcggctgggagcccagcacgcatacgccggtggtgactccggcatggaggcgttccagggctgaaagccggccttcatggtaccagaagtcgtcagtaatatagtttttatatgtgtgggtcatcacaggcatccagtagcttgtaagatccacaatggacttaaaggcgctgtgtcccccatggccatgggcatccacaaaccccggcatgaccacatggtctttacagtccagcacctcctttgcctcaaattgctccgcttccatgctatcccccacaaaagctatccttccatcttttactcccacagccccattctcaatcacacgccgtttctcgtccattgtaatgactacagcattggtgagcagcaaatcgtacatatgtatcctccttaatcctgacctttcttacggaacagtcccttcttatttatgaatgggaaatgacggtctaaacagctcatcctcagacagatggcggtagtccctctccatatatcccatcctcatcttgtcataatacttctgcccctttgcctttatctcctccaggtccacaccttcaatggtcctgttcttcatgacagtctttccgttaataatggacagcttcacgtcacggccgcagccgcacatgaaaatcgtgcggatgggatcatccactgctcccatatggaaatcctccaaatccacagctatcatgtcagcctttgcaccgggagccagacggcccaggtcctccctccccaaaagggcggagcctccaagggttactgccctgtacacatcagccatggcagagccttccaccttgttctccgccatctgtgagaaccaggaagcaatgcggatattctggaaaaaatcaggtggaaacgtatctgttcccactgccacattgatattcctggcgcggtattttgcaaaggaatcctggtaatgcccgcttctccctattataaccgggcagaatatggctgtggtacctgtatttgaaaggatagacagatcgtcccctccatcctccacccacctggtaccttttacgatatagcagtggggaattcccacgttctttccgagaaatccaatgctctccagatattccaccgggcttttgcctgtccgctcctttatgaagcggtattcaaacagtccctgtgccgcgtggagcttaatggggcactttaattcctctgcatactgttttgtgcggatcaggttctcctctgtctgtgtctcaatccgctcaggcagcagggccccacggatcaggccatcataggccccgtcatatttgcggataaatcggaccgctctctctaacccttcctctccctgcccctccaggtaacggactgtcatggtaccgtcaggacggactacgttcagaccgcactggtagctgggagaagtgtacagcctcagacccagtctgcctgcatgatggacgcccgcctcttcctcttcataagtatccgcccattttttatagtatgtggatgtgatgggcatggctgtggtaatgccgtgcataatcagctgtgtgtacgcgtagagggacttgaaggcctcctcctctgctgtcatcacctcatgagtgcccttctcaaaatactcctctgaaggattcaggctgctcctgatattgctgaaagcctccgtgtggagaatatcatggtcaatatcaccaagggcatttaagtcaataaatccaggcatgatgacggcattacctgcatcctctgtcttgctgacttccccctcataatgctttcccacataaatgatggtatcattctcgtaaaccacctcaccgtcccggataatttcatgatccgctccgttatagccgatcacataggaccctttgactctcgtaatcatattattcctcctcgctatgagctcttacacgccgtaacccactaagacacaaggcgctgcagggtgagccgccctgtataatccatacagaaagccaacctttgcagcgccctttttcttatgcctgaatcccggacttatggttcagtgcagatttattgttcagcattttcaaaatgtacgttctggaagaaatggcttcctgccggtgtgggcacaaatccctttacattgcttctgataccaagaacctgctctgtattggcaaccggaataacaggaaggttgacgcgcagatatttctggatatccttgatgatctgctccctctccggtccgtcactggtatttctctgcgcctcaagcattttatccatctccgggtcagagtagaagcccatgttgtttgtaggaatctgcttgctgttaaacggtccgtaaatgttattgtccggctcagggaatcctacggcgccaaaaccgatcaggaatatctctgtctcaccggcatccaccatgtcatagaaggtacccgcctcataactctggatctccacggttattccaacctgagccagcatgtcctggatgatggtagcctcgttcagtctgttggtgttttctgcgcaggtcagttttaagtgaagatcagataccccggcctctgccagaagcgcttttgccttctcaacatcatacctgcagtccgtatcagaatcatcgaaatacttcatgcttggcgccaccgtggtgggagaatactgtgcacttcctctccagacagctgtaaggatggcgttttcatccagggcccagtcaatggcctgccttactcttacatcatcaagaggtttcttggtcacattcataaccatgtattccacaattgtgctggcacgttttacaatagcagtatccttgttgttctccagcctctcaacatcatttgcaggaatgtcaaatgcaatatcaatatttccggattccagctcaattacgcggctgttggcctcaacaattgtgcggattaccaggttcttataagccggcttgtcgccccagtactcgtcatttctttcatatacacagcggtcattttttgcccatgatacaaatttaaagggtcctgttccaaccgggttctgtgctgccttctccggatcctccgtgaattccttctcgctgacaaccactgctccgatatacggaagatagccaactaaaggagaaaatggctcatgggtggcaatgatgatggtattgtcatccaccaccttgcagttatccgcatcaatggctgacatgatgtaggaaacctttgcgccgtccggtcccgtggctctcttaaagctgtaaagcacatcgtttgccgtcatcttctccccgttgtggaaatacacgtcgtctctcagcttaaactcccagtttaagtcatccaaccttttccactctgtggcaagaagaggctttatttccccgtcatcatcatatctcaccagggtctcgtaaacaggatttaagttgtttacactgcttgaggtggatgacgcatgcgggtccaatgttggcggatctcccgtaatagccactgtcagggtatccttttcctcctgagccttggaagaactgccgccgcagcctgtcactaaggatgcagccagtgtgagtgccagcaggatgccggccgcctttttcacttttctcataatctttttctccttttctttcatacatgcagatagttctgctattgccattacatttcccccgccagatgacaggccacaaagtggttgtctcctgcgtttttgagctccggatcctcctgtctgcaccgctctgtcacatacggacagcggcccgcaaaacggcagccccccggaagattgacagggctgggaacatcccccttcagtataatctgttccctctcaacccctacctttgggatgggaatagcagataagagcgcttttgtatatggatggagggggccgctgaaaatggacctgtaatcactgagctctactatctttcccagatacataacgccgatccggttgcttatatgctttacaacgcttaagtcgtgagaaataaacaggtatgtcagccccaggtccatctgaagccgttttaacaggttaatgatctgtgcctggatgcatacgtcaagggctgatacgggctcgtccagtacaatgaattccggttttacggataaggcacgggcaattcccactctctgccttcttcccccatccagctcatgaggataggcattgatcagccttctggaaagccctaccacatccatcagctcacggaccctggcatccagcttttttttgtctctgcggtactcttccatatttgtaagcggttccgcaatcagctcaaacacggaaagcctgggattcagacaggaatacgggtcctggaataccatctgtacatgttccctgaatgttttcatctggcttttgttaaatcccagtacattttctccgtggaaattcacctctccgctgtctgcttccagaagacggatgatggttcgccctgtggtagactttccgcagccggattctccaacaagtcccagtgtctcgcccttgttaatataaaagctcacatcatccaccgcatggagcagtcccttatttacatggaaatattttttcagatgattgatttcaactaatctctcttccggattactcatctttatttacctcctcctgcttctcgtataaaaagcacctggtataatgctcaccgttcacaactgtaatttccggctttttatgcttgcagatttccatgcagttggggcatctgggattgaaggaacagccgtcaatcctctctgtaggttccggaggcagtccgtggatctcctccagccagtcctcctccgtatccagtttcggaatggaattaaacaggccctttgtatatggatgacagggattatggtaaatcttgcttacctccgcatactccaccacctggcccgcatacatgatggccaccttatcgcagatctccgcaacgatacccagatcgtgggtgatcaggatcatggaggttcccagcttttctttcagccccttgatcagattcatgacctgggcctggattgtcacatccagggccgtggtaggttcatctgcaatgatcatcttaggacggcaggccaatgcaatggcgatcaccaccctctgtttcatgccgccggaaaactgatggggataatcattggccctctctcttctgattcctaccatctccagcagtccgcaggcctcctcaaacgcttcctttttgccgattaccttgtgaaggcggatcatctccacgatctgatcccccaccttcatggaaggatttaaggaggtcatggggtcctggaaaatcatggagattttttctcccagaatccctcttctctccttgtccccgatttttaacatgtcttttccgtcaaacatgatttctccggaagtcacctttcccggcggtgtggggagaagtcccatgatggtcatggccgtggttgtcttacccgctcctgtctcccccacaaatcccagcgtttctttgggttccagggttaagttcaggttatttacagcatatacaattccgtcttctgttttatatgtaacacttaaatccttgatatcaagcaatttttccttttccacgatctgctccgcctttcattagtttctcagtttcggatcaagcgcatctcttaagccgtctcccagaaggttcagggagagaacagtgataacgatggcaagacctgggaacatggtcatgtacgcatatcctctgatataatcacggccggaggaaagcatgttgccccactcaggattgggcggctgtatgcccagtccgataaaactcattcctgcagctgtcagaatcgccccggcgatacccagcgttacctggacaataacgggcgccacacagttgggaagaatatgctttataatgatttttgtattggatgtgccggacgccctggctgcttcaatatactcttcctcacggattgtcagcacggaagcccttacgatacgtgcatatgtgggaaccgaggatataccaaccgctatcatcaggttcatgagtcctgttcccagggcagctacaatggcaattgccagcagtgtctggggcacagccagaagcacatccataaaacgcatgatcagattatccacccttctgccgtagtaacctgcgattgcccccaaaacgccgcctataattacagcaatgccaacagagacaaagccaaccagaagagacattctggccccgtacacaacacggctgaagatgtcgcggccgaactcatctgttccgaaaatgtggctgggactggggtgctgaaaggcatcagccagattctgcttggcaaaatcatagggcgcgataacatgtgcgaatatacctgtaaataaaagaatgatcaggatgaccagtcccaaaaccgccatacggtttctgctgagcgctttcaggatggtcacaacctgacttctggatttcttctcttccatctcaatcaatacctcccgttcttttattcttttgagaccttcggatcgacaactgcgtacaacaggtccaccgcgagattaaccaacgagaaacatgccgcaacgaacagaacgctgccctggacaatggggaaatccctctgcttgatggcctcaatcatcagacgccctacccctggaatggaaaatacaacttctgtcagcatagcgcctcctaaaagcgttccgaactgaagtcccaccacggtgataacaggaatcaaagcatttctgaacacatgcttcatgatgaccacgctttccttctgtccttttgccctggctgtcttgacgaaatcctggcgtatcacctccagcatgctggaacgtgtcatcctggccactaccgccgtactctgcatccccagcgcaagggcgggcataatcaactgcttaaaacttccgaaacccgaaggtggcagccatcccagattgacagagaacagaataatcatcaggatgccgatccagaagatgggggccgacgttccaatgagcgccagcaccataacggcattgtccagaagggagttctgcttgaccgcagagacaattcccaggaaggttcccaggatgacggcgatgatgattgccgctgtggcgagcttgactgtgttgggaaacactgtcataatctcgtccagtacaggtcttctggtggagtaggacgtccccagatcctgatgtactacgatatttttgatatagcgcccatactgtaccagaaagggatcgtcaagtcccagctccagccgcagttccgcctgcgcttctggggtagctgattcacccagcatcatccggaccgggtcccctggcgtcatgtagagcagcaggaataccagaaatgacacacccacaagcaccagaaccagatataccagccttttcattgtgaacttcagcatagttcattcctccattatacattttcatgtagtatttatgcattttattatactacgctgtattttggaaatatattggcacaataggataatcccgcccccctattttcatccttccagtgcacccctcctttattcatttccaccaaatttatgatatacttataacaatgattttattgttattgtttatgaatataagatttagttatctgtattatacataaatgcggcggggagcatccaaatgaaaaaactgacagtggctgacatcttacaactggatattctgaaaaatgtaacaatatgtgcgggagccgcaggcctgtctcattttgtcaccggcatcaccacagccgaagacccggatctgatccagtggcttaccggcggcgaaattcttcttacttctctgtacggagccgtaaccggccccctttccttcaaagaatatattgatgccctagcctcaaaacacatcagcgctttgttcataaagactggggagcgcatgccggaaatcccggcggaaatcactcagtccggcagccagtacggaattcccattgtacagcttccccctgatgtgagcttctttgacgtggtgtcttctgtcatgaaacagatcctgaataacaaagcgcagtactttatagagcttcagaacaatatgtcacagcttctggcctccggggccggagaacaggatatcctggattacctggctgaatatgtgcctgcctccattcatctgttcgattctgataaaaatattatttttacttcccaatcagaagaattccgctctgaaatggccatagcagacaggatctcgcttcccattatgtgcatgggagaggtgtgcggctatctggaagctgcgaccaaccgttatctcgatgaaaatctggaaggacttctgaaaaatgcggcaaatctgtctgccgttctctatctcaaaaagtattacactgttgaaatagagcagagatacatatccgggtttttaaaagaattgtttcgacaaaatatgggagtaaaacagattgtagagaaggctgaagggtatggctggcacgagaatgattcctatctggcagtctccattcaactggaggctgccagaaacataaccaaggttcctgaggcgctggcagagatgacgcgcctgattcccaaaagcaactattacttctgcatccaggatgatctgctgaatataatatacaggacagaaaaaaagctctctcccccagaattgtacgatctggtcacagaagttataacaaatttaaaccaatacatttcaaaaacatatggctcttttaccttctacgcaggtatcagcagcatcgcatctgaattgttccagctttcccagaagattcaggaagcagcagattccctgcagttctgccgcgtgtttaacaacaggctggtaaagtatgaagacatgggggcactgcgcatgctggccacctattcccaccgcagcaacctggaacaggtgattccccctgcagtgaccagattggcggaatacgacaagctcaataatacccaatatttagaaacccttgattcccttcttggaaataacctgaacctgagcaaaaccgccaaacagctgtttatccactacaagacaatgcttcaccgcatggaccgtatctgcgagattgcagagatatccctggatgacagacagacccggctggatgtagagctgggagtaaaactttatatgatgctgcccaaataaaaaacgcagcatataaaaaagctagtaatccgagattcattctcgaaattaccagctttttttaactgggctacaaggattcgaaccttgaaatgacggagtcagagtccgttgccttaccatttggcgatagcccattattcagtttatccgcagcgccctgccctgactgtttgtcctgattggcggctgcggagtttattatacccatattgtggcaattagtcaagaacttttttaaattttttaaatttaatatgaaacagactcaaaaatgccggatttagccgatgcattacgggcaggcgtcccctgcatcggagtagtcgggtatccacccttccagcacgttggataccttctcgataaagaaatgggaaatgcttcctacgatgagggcggccagcacggttccttccctgattcccagcacatggcccgtaaagaacagggaaacccccacagcacttgccacaatgctcatatcaaaacccgtttttaccaatccaaacctccagccggtaagccctgcaattacacgcaccagcccctctccaggaaggataagcacattgggaatcacctcaaaggcaatacccagccccaggaacacgcagcccagcagcagcatgagcacctgccccacatagcttcccgtcttccagaaccccagaatatacatccatccgtctatgcaggcggaaaacagcagggcggccggaagctgaagcagctgtatctttccaaatgccttccccagaagggcggcctgtatcaggaacatgaccgtgttcaccagcatggtaaactctcccaggctgtgagggaatataaacgtcaggacaaaggcaaggctggtaatgggcgacgtgcccagtccggcttttgtaatcaggctgatacccaaggcgctgaatatgacacctgcaataaacatgctgtaacgcttcaacttatctgaatttttcacgtgtttacacctctaaaaatttttgtataacctaattttttttatatatcttatgatatcacgtaaacccacggctcacaatgggcattctaacttaagttgactccatattttcgtcacaatgcataatcatttttagataacctaaaatttttttagatttttctatgctttctcaccaatgtaatatgggcatacatggtcaccgcagcgctgaatcccagctgtacataatacgcaatacctctggacaataccatggcgggcaaaagcagatccccgtaaaaaataggatcgaatatggtcaggaacagatgctcgctgattcccatgccccccggaagaggcagcatatcggctgacacagaaatcgttgactggagaagcaccagggtaatcatggccgtccccttaagcccaaaggccctgtacacaaaatatgtcactgaaaacaatgccagccgctggcagaaggtgagaaacagcactctgagcagcacatgcttgtgctggcgcaggaaggcagccgtatcattataatgctccatggtaaggagcaggcgctctgtcctggaggtttttttcttgaggaaacgaaaatgctccagaagtcccagaacccgcattgccatgtccctggcaagagatgtgtggaaagccagaaccagcatggcggcgcagaataccacattaagccccagccccagatagtagacaggcatgacctcgtacaggtaacgatttaaaaagccctggccgaatacagccagaagacagccaatcaccaccagaacggatttgtatgtaatggttaccaccatgagcaccactgtggccacaggcacggggatcatgttcttcctcatatagtaaacctgggccggctgtcctccccctgccgaaggcgtgatgcagctgaagaaaaaacccacagaggaatacagaaaacaggtccttctctttgtctttatgcccagggtgcccagcagataatgcaggatagcagactccgcccatatgaaaaaaataacacagccaacccccataagcaggtatacaggagacgcctcggatatggtgtccgctatatcgcttaaatcctcacccgaaaatacactgtaaatggtcagaacaaatacagtcagaaggaatattccgttgatcagattcttctttttatcagacatgttttccccctctccccgtcacgtccgccggtatcccttttacgcagcttcatatccccgcaggattctgcccccatggattaccagacttgcaggttccctccccgcagggttcccggtccgaaaacagaaatataacaaaaaatcccgtcaggcataacgcctacgggaccaagatataacaaactgggctacaaggattcgaaccttgaaatgacggagtcagagtccgtcattcgaacacccatttttcttgtaaaatcaatgctttgccggttctgtcctccgctttcgaacaaaccgtttcgaacactttgcttctaaaatttcctactgttcgattatatcataagcagtgttcgaacgcaataaaaaaagccgttcccggcttttatattctatcatactatacttataatgctttatccattctgctagtgggttctgctgggctaattccaaatgcctctactatgtcgccgggttggtagtatttcatcagatactccactttggcggcttgttttaattggtctatcttatcgcccatttctttatcaaattttaagttccgatacatctcacccggcatcgtgcaacggtaaaattcagccggattaccattcctgtcttttttagttccggaaactctgtttaccttatagcaataagtaatatcagcaatacgtcccaataattggcttattgggtcttcgtctgcttctgctgaatctatcatttttgcatacacttgctctggcgtctttattgtcgtgatatgtacttcattccataaccccagcacgttactataacgtgctgggagttcctttttatatccctctaatatgcctaacagcactgcgtattgtaattgtcctcggaactcatcaagcaccagaataggctcacctgaataagaatcaaatccatttttatagtccgagaccatatataactgttcttcacctaacgtttccaccaagtccagtgtaatacccgttttcccgcttccgctttcacctatataccaatgaaccgccaccgaccgtttaaagggcgtttccaatgaacgtttatcaaaatacatgttcttaatcatggtcgtgtatttattttcaaaaaatctatcgtccatacgcctaacctctttccatgtaaatccattttctattgcttccctaattaactgaacatcggtacggtctccctgtttcccaatcaattcaccctcttgagccttggcaagaacaacctcgcccttttcctcaaacttgcctgtcttatttatatattcttccacttgcgctttgcttcccttcgtcatttctatatgtgctttaccgccaatgaatttttttactgtattaaaatatgccttattgacatcgcacaatacaatatgcagatgctccaacccttccgcactcttacaatacaaacacgccgcctgtctcgtttttgaaacccactgggcaacaacgaaatcacatatttcctgcgccgtccatgtgactatatcctccggctttgctcctgccactccatgggtgcgtacattcgggcatacaataaaccacgaacgtgagcgcgagcctttatctgctggctttttaggtttagcctctgccatgttccgcaccctcctttattctgtaatctgttatgatgaatttgataaaagcagttggtgagattccgcgtctttcggattctgcttttatgtattcgtcaactgaatttgctaatcttatcgtataccttctataactattttgcttcatttgaattacctccattttttattcatagctactatgtgagaaatggcggcaacggttaacaaaagttgacattttattataaactttttataaactttattaatcaacactaaaatagcccatttaataaaaaaagccctgaatcactgggctaaaaatctcattcactaatcctcataaactctaggtttcccgaactttaagcccatagcccaaaagttgagggtaatactaacctcaacttttggcaaggcaaacaactttatttagtatttcatttacgaaaaaggaagccccagagggcttccgctagtcttttacatattcaattaagtcactaagtttacaatccagcacataacacagacgcgccatgactgccaaatccactcgctggatttcgttattcatataggcttttaattgagtacgttgcatttcagcacgacacgctaacttgttaatactaattttctgttcttccattacatccttcaacttcaagcgaacgtatccataatcaacgtctttcatggcgacctccttttgtttctatgatactaagtcttgccatacttttaaatgagtggtaatatatgtgtagatatatactcaatggaggtttttatggatacatatgattacagacaagacacagacagcattaacgagacacaagcaaaaattgacttgctttcggaaaaggaagccaaacaagtttcggagttcatttcctcacttaaagagcagtccgcgaaagagcagtccaccgctttactagagagatttacttctgcccttctcccatcattaaaagattttgccgaacttaccgggtctttacttacggttgaagaaagtaaacaatattgtgtcgtggctgaattaacgaatcgtcaaggttttgacataactgaaagtagcaaaatcataagagcaatattcacattggcaaaccatatcgggattgggagtaaagacggtgaaacttgcatatcgctcatatttgattgtacttgtcttgaataagtgtataatgggtaacccaattatataaaataaaatgaagcgcaaaggagaatgtaaaatgaaaaagaaaatgtcggtagggattctttcaacggctttagctatgtccatgagtatgacagcttttgcgggacagtggcagtcagacactaacggctggtggtggcagaatgataacggaagttatccagctaacacatggcaatggattgacggaaataatgatggaacggcagaaagctattacttcaatgagcaaggttattgcctgatgaacaccaccacacctgacgggtataccgttaatccagcaggagcatgggttgttgacggagtggttcaaacgcaagcaatcaacaccatagtacaaaatcccgcagtgcccgcattaaacttacttgacacaactccaacaaccaaaagttcttatgctggcaaattcacaaattatcgaactgcacaaggtgctttgtggtctgaaggatattatctttattcatataattgctaccttgaattttacgccgggaagcagtatcaaacattcacggcaactctgggagtaaaacagtccaccaattctcctactatgaccgttgagatttatggcgataatgatgttttattagactctttcagccttgataagcataccgaacccttcgagatttctgtggatatctctggacagaattatatcaaaattgtaaatgctcaagacgatattatgggttatgccatgtttaaaaacgcacagttcaaatgatgaaaccataaataagcgtgtccccagtagggacgcgcttattatattcgttcgagatcttcaccatcaatttctttgtaaaaatcgctttcgaaccgttcccttacccgctcaaattcatcagcatcataagaagttataaccatcttcatatattcatcgaaagataggttatgagccttttcatattctgaatgaaattcaacgtaaactggttccatatattcaacgatttttcgtatcgtatacaaatcgcccaagcactcggcaatcttgtcattatattgattccattcttccaagggtattttaacaatctcagttcctttgtcagtaccctttttaatgtgttttggcattagaagatagtcctcaaaacgcaaatcaaaaaaaatatggcgcattttttggacttcctcatatgccaatgattcaagtttatctttgtcaatcaagaccgtgttttctgtcaaattataaccctcctttaattattatgatacaaatgccgcatgaaaaagatttttagcggcaccgtcctctttcttttgtagcctctctttgtatcggctctacctcctcacccatggcaatcttcacagcacgtgtaacatcagacagcagttgaggacgctttttgatggttcgtgcaatatcaatgatagattgcccttttaaggcttctaacgcctctacggactgcctcgcccttgctacttcctcttgtaccttttgtagctttaattcggcaatagaccgattagcgcccactgtaacaccattcaatatacctatatcacgtccaaagtattcagtcatgactttactcatgtccttatgtattgaccgaagttcgcaacgtgtcagtacttctttagcagataccttttcaatccctttctttttatcaaacaccactggaataaagcaaaagtgaagatgtggctgtcctgcctcgtccttatgcacccaggcagacactgcattcctctcgccatacctccggcaaagttcttgataagcggtattaaagaataccctttcacccgatttcgtaaagtccaatttaggcagcgtaacaatccagtcacataaggtctttacgtctttgcgtctttgacatttgacctctgaaagacgctttctataaaattcaaaatctgatttgccatggtcacagagattataatttaagcaggtacggcttgaatcaatatccctattgcctatgttttgagctgtccgattataatgcctcaacatatgaccgaccgccgatttctcatatttttcaacatgcatattatcacctcaactatattatgcaagttgactattcaccatagccgcaatatggtatagcaagttataccattttccaaaatggttcaacttgctctcatgcgccgagggctttagcgtcccacccgtaaaagcaagaaaacacagtttcccgcttacgcggggaaactgcgtttccctacttttactaatctatatccacgagagccggaggcaccacggcgatgctccttccggctccgcgacccaattttacatctttcctctactgtatcatgtaatcaacgaaaaaagcagaggaatcgctccctctgccctttcccttactgcaacggtgaaaccgtcttatatagttcactttggtaatttgccagttctataaactccgtgtccaatacatgctgataaatatcagttgtgataccgattgtactatgtccggcgtttctcgaaactgctcctataattttatccttgtttgctgaatttctaatgttgaaactaatcccgctatgtcgcaggtcatgcacccttggaaccttatacatatcacgcaatatacgcttatgtcggttccagaccgttgattcacttaacgcttttgtcgggtctttaactgctggaaaaatccagtcgctttccttcgctttgcctttagcctctgcatcggcatatcttacgattaagagggtttttacttgttctggtataaaaacacagcggtctgaactttcagttttgggtttctttcggtcaactatcaacttacccatatcatcgcgtgtccatgtactatgaaaatgaaccagattgtttttatcccaatcgctccatgtcagtgttgtggcttctcctgctcggcaatacatatataggataaactgcaagacgtcagcttcttctcccatctcttcacaaagtttgagataatgctttgtctcgctgttatccaaaattttcattgggtctgctttgctcttttttgtatcgaatttgaatcccgttgccgggctaataaagttcacatctatctcgatgcaataataattgttgtaataatctgtcagcaggttatatgcgcctttacgacgcgtctcacctatgccgtttgctttcaattcgtctaaccaatccgcaacatctttgcgggtgattttatcaacttctatctttccaatagggtacggcttcacaagatttcgattcagttcattcttatcattaatactacccacctttagcttcctgctcacagcctttatcactcccgcctgcttcattatggcgtatcgtttgagctgttcgactagggtgttcgaaatatccttgctttccgttttatctgcttcgtcagcttttgaactctctaattccaattcttgagcatgtaatttttcttccaacttttcccttgctagtcgtttggtttttccgtaggcgttaggtcgccaagtatttccctttgctgtcttaactgatggaacgctacaataacatttccattgacctttatcctttacgaaaccaaattctgtgtgttctaacttcatataacattctcctctctgtctgtcgaacagtttgtcgaacactatgttgttagaactggcaaatttcagtttggaacaatgctctttttcagaggcgaaaaaagtcccaaattccttgattctacaaggaatttcgaactttcttcgagctgggccacaaggattcgaaccttgaaatgacggagtcagagtccgttgccttaccgtttggcgatagcccatcaacacaacgaaatgtattatataatatagtcggcaattcgtcaagtgtttttttcaattttatccatttttatactttgtcaatagttttgcgacaagtttttgaatttttttctatgccaggtttcttatttcctcttcaaagagttgggcggacgtcttaaaaccgaaaattccccttggatagttgtttatccagttttctatatattcaatgtctcggtcctgcttctcgtcaaaatcttcccctttcggtatatgtcggcggataaggcggttattgttttcattactccccctctcccaactgctataagggtggcaataaaaggcaaaggtccgtttttctccctcatgtaatacagaccgctccaacccctcatagtctgaaaactccacgccgttatctactgtaatgcttctaaatacctttgtgaacatatcgccccatttcctttctaatcggtcaatggcttctactacactggccgccttttggtccggcaacttcactattatttcatctcttgtctttctctctgtaagcacaagcatacatgactttgttactccctgtttgccctttaccgtgtccatttcccagtgcccaaaaatttcccggttctttacttcatccgggcggttctctatgctttcccctgcggacgctctcttttgcaccttaacccttttattgtgcttttttcttttcccctttactggcaaatctttatttgtgagttttaggaaaatccccttatcaatgtatcggtataatgttcttacgctgatagaagtagtaaactctatgccgctttctgctgccgccgccaatgccgcttccgggctatatttatcttctattattttttcctctatgtactccgcaagtgggcggtcatttcctatttttatattccgcccttttccctgggcgttccaatcatggttcttttgtcccaaatcgctgctataccttgtttcctcggtgtaatcgctatttctatgggtatattctcccctttttatctccctataaatagtgcttctatgaacgtgcaaatattccgcaacctctactactttatggccggaatttaacatagtttccattttaattctatcgttttggcttaaatgtttaaataattttcccatgaaattacctctcttgtgataaaacgggcacgaaaaagtccgtgccgttgttttatcgcttcccggcaagtaattcctatggtaatcgtaattcatattgtgcccggtgcgttatactttttctatttacaatgatgtggacattgtggggtccaggctcccggcctttattttggttaggacgattgcccaccgcccaggcgtgccgtctgtttgcctgtcctgctacacgccgcccggttcacattaaaccctggcagaaacttgtcaaccaataccacaatgcccaccattgtaacccgtcaactgtttataggggcttcggaccctcacgccgcccatggtcggcgtggccgttttaattgccgggcggctcctgctgccgcccaggcggttgtttctatgcacaacgggcctgctccacccatgcttgtgcttcctctgtgcttccaaaccaatcattataaatatctttccggcttgtacttgtgtatgtgctttccgggcacgtttccgcttctttgcttgccgtaatagcggccaccactctgcccctatcatcaaatgaagatgttacgcaataccatgttttcatatccttatcctttcccggtggctctactgcccaccgcttcccattctttcgtcaatggcctggctgataaattcgtttacgctttgtcctgctgccgttgccgccgcttttattactgcttttctgccttttggcacttttatttctatgcggtcataattccgtttgttaaattcgttttggtatgcaatttgattaaattctccggttttagttcttggcattttccaacctctcttcctacttcggcaaattccctcttcctttctcttgccaaatgatttataataattttacagtttgggcggctttggcaagtccaccgccctttctgtacccctaaagcctattcgttaggcttttctttttttgccatgtctctgacttcctgcaccgccttggcaacctcttccatgttcttgcaattactgaatttatcggctaccaggttaaggattacttccatttgcttgtctgtcatgttctcgctcatgttatctcctttctatgcttgcccatgtattcgttaagtatctctcttaactgtctttattatataacatatgtcggcatatgtcaatacatattacgacatatttttattttttataaaaatccctcaatgtgtggctgctttccgcttcacattgagggtaatttttatcttctactttctatcacgaaaataatttcgttgacttttgcctggtttgcttcgttacttacgcaccttaccactctgtcttttccgtccgccgtggtaatggttacgccaatataatttcccattttcttttcaaatcccgtattttgggatatggcaacgattttgtcatacatgagcgtttccgtttttgattggctcccgtcctgctcaaaatataggcaccttttttctgttactgctaaaactgccgttgaaaaaaccaacttttccgcctggccttttccttgaatacaataatcaatcttttccccaggcaataatgtttttccaaatacattttgagccattacctcttcaatcggtttttgttcttttgcttcttttttctttccaaaaagtcccattttccaatctccttttgttggttttataccgtgcccccattgtgtaattcaatagtggacttgtattagtcccattatagcacacacttccccgtaaagtaaagaaaaaaggactaatattagtccagaaaggggccgcaatgttacaagtcaaaataaaagatgatactggaaataccataggccaaaatataagaagaattagaaaatcacgcaatatagggcaaaccgctcttgtccgtgatttacaattacttgatatagacatgacccgtgaagcattggtaaaaatcgaaaggggaatacaacatatacagttgagccaattaaaaggtattcgtgatgttctccaaacaacttatgatgaattactggaaatacattagacaaaaagggcacgcctttcattgacgtgtcctttctccgtgacatattaaattccttgcacgtccctggcggacgtattccaaaaggcggtattgataattactatctcaacatagcgttgacttttgcctggacctcattgtaattataccctgcggcttccaggcggttctttctctctttcccgttgccccatttcccggcaattacttccttggctactgcggccacgctctttgtgacctgggacccgctcccggtggcttccttgtcatactttggcacgccataaccacggatatagcggccatttacgtccaatgtcctgcggcctacggcattgtttttattgccctcgataacggtaatctttccgccgctcacgctctcaacaatgcccacatggtccggccacccggtacaatccccggccccggtatcgtcccaatcgtaaaaaataatgtccccagggcttggcgtcctgctatcgctttcctgccattcccccaggttcttgaataatgcaatcatctggccgcaaccgcactctgtcggtataatgccagtcaaaccgcacttgatagccacggcggaaacaaaggtggcacaccaggcgtctgtatatttgactttgtaacccctcgccaatggtttatggccgttgtacacgtcaataatgcccttgtgggtgccgtccgcttcatttcggccaatccacgcccttgcctgggctaatactgcacttgctaattttgccatgcttccggctcctttcacatcatactgctgcaaatcgtactgtgtaacaatcctcatggtattgtccacatacttgctactggttgcgtacccgtccgccttaatggttctaaggtacgtttccgggtccgtaatgccccgtaaattctgatacctagacaactggataaactcaaaataacctttcacgccctcttccatgttgtcatacacccggaaattgtccttaatctgtgtaagggttcccggcgtatattcttccatggtggaaaggtttacgcttttcccggtccattttgtcccacatttcagcccaaaataattgtgatacacggcggccaggcggctttctccccaaccgctttcaagtatcgcctgggctataatcggactatgtaccaaaatcccgtatgccggggcgtatttctgcacgcacccggcaatctttttaataaactcctgcttgtccatggtttacacttcctcttccgttgtcacttccacttcggtttccacgttggcggcgtctgtcaaaccctcgccaatgatgtaggccaccacggacgccccggccatgataagggccgttacctgggtggcggtgttctctgctcccccagtggctacaatcatcatggaaacaaaggacgctaccgccgtccacattttccggcttgtcaatttcctggtccagttaatatttttcatgtggtcttttctcctttcttatatttccaaaagccccttggcttgttggttcattcgtaaatcccttttatgccctgctccgttaagaagtccttttgttcatgcttaatcttacgggcatattccagggcggcttctgtctctccgttggcgtgtccattctttaaggccgtggccgccgcttcccccagggcaatagacgccatgacactttttatgataagaacctcgtttttctcgcggattttttctttttcttccgctgccgtctgctgcttctttattttttgttcaatcatccaaaaacagaaagcggttacgccgcttggaatactcattgcaataataagtgtctgtaaatccattcctttatcttcctttccttaaatgtccatgggcttatcatacgccccatggtgttgaaattctgacccacttacaccggaaccaaaaggccgctttgggtctgctcaaattcccaaaacagtaaatcatattcaatggcctttgttacgtggtaggtgtcggcgtgccccatgtgccccaggcggctttgatatttccggttaaatgtttcctggtccagttccccggcctttaggtgctttacgtcctttttcagccgccggacggaccccttacgcactttcctatatgttgggtggtggatatatccgcaaaagtccacaccgttcccggcgtatagaatggtgcttttagggtttatgtgcaatttcatttcctcttccaaaaattcttcaatccgcttttcccattcctttaactggtttaaatccggggaaagaattataaaatcgtccatataccggacgtaatatttaatgtgcaaggtgtgttttataaatttatccaggcggttgccgtacacattggcaaataactggcttgtaaggttccccacgggtatgcccacgccgtccggcaatatgccgtttctgtctatgatgttatccataaggtaaagggctttcttgtcccctatgtaccgtctgttttcgtcttttaggccgtcatgcggtatagacgcaaagtatttacttatatcccctttaaaggcgtatatccgtagcccctgcacaaccataagttcataaagccatttgtataactgattgcttgcggcgtgcatacctttcccctcacggcaagcataggaatggcaataaaacctttcttcaaataccggtccgattgcatttacaatcatgtgctgcaccactctgtcataaaatggtaaggccatgataagacgctcttttggctcccacactttgaacacggtataaggtccctgggaatatgtgagtgtttccacttcctcgcacgccctcaatagttcatcttcctttgacatagaaaaagccaatacctcttcatggaaccgcttgttttctgcggctttgtggaatgagatattggcattgtcaaaggtgtacatcttctcatgtaatcctttaactgttttcatttttgccctaccaattttcaaatatttttactcaaaaggcggtgcctttgttaatttgtccggacaaacgccggaacgggaaaaccgtctgacttatcataaagatagattgataaatctttgccagtggcctttttaggggcttctgtgtctgaaaatgccgattagtcacacacgcaccacacgccaatgttcgtgttcacgttccacgggtaattgttgcaattcaccgtccgggagccgcaatgcacgccgttgttccagttgccgccgccaatgagggcgtgcaagccaggaaaggccaggtgcgaattaacagtttccccaaatcacttacttatccggtttccaggttccggtctttaccgcttcaatgacgccgttcatggtgccgcctattgccctggtgtggcggctgatgacctcatagcggtgcttgcttattgctttatactgcaaatcgtaggatagacgtatcaatgttttaatctgctgcaattccacgtccgccgcataaatatggcttttcgtacccgttttcttgaaacggattacgtcctttagcatttcaaatattgccgtcttaatctgcgtctgcaatgcaaacttttcaaatttcggaaactgggccaggatagggtaaatgtataaaagaaaatcataaattttttggtacaattccatagtgcccatgtaggcgtctatttgttccggttctttttcttctgccattacttcttttcctcttcgttgtaggggttgggctttcgcccacccctacgggattacagactgtcacacacgcaccacacgccaacgctcgtgcccacgttccacgggtaattgttgcaacgcaccgtccgggagccgcaatgcacgccgttgttccagtcgccgccgccaatgagggcgtgcaagccagtgcttgaatacatatacgcctggccgtaaccgccaccgaaaacgtcataccatgccgcacttgccgccgttgggtcgtgcaaaagttcattaagccacttccacacattacccaccaggtcacaaatatttaaagcacttatggcgttggcaatctttccaactgcggttcttgccttgtttgtggtggccgtatgtccgttggcgttggaagcgtcaaggccctgggggcttccgtctgctgccacggtaaattccatgtaatccggcaagcgtttccctacacgtctggcccgttctcctgcaatataccagttaaggccctcggttccggttatcggcgtgccgccatacacggattgtaaaccatttgccccgtcatcactggaaaggtaaatgtctccccataatgcgttccccaggtacaccataccggacgggtcgcatttcggacggtgctttgtggtccatacactgttaggcagaatatccacacgggtgttgctctcccaaccgctgccccttacggacccggacgcattgaccgcacgcccgtaatcgtccgtatttcttacacggccataatggaaaccgccgattttacgggtatttgtatcgtcccaggcgtccccgtccggccaggaagaatttaaggaaatcaaataaagttcgtcctgggcgtccgtcccagggtcacaaatgtaaatgtaatagtccgaaccgtgtacaaaatcgcttccctggtccaaatttgcttttgtaagtacggtttctgccgttttaaatactgcgttttcccctaccgcaatgacgcacccggccataattgtgacggctccctgggcactgtactggatatactctttttccggtgccacaatgtcggaaatggccgccatttttgcaaccgtgattttggcccgctcgtccgtcatgttctcgtcataaataaaaagtctgctcattatgccaacgctcctttcatttcttccacttcctcttccgtgatacccatacggtcatagaacgtaaccgctgccggaataccgattgttaccgtgccaatgtttacggcttttgaaagggtaagcaccgtaaaagaaattgtgttgttctgccctgctgccgtggtgccctctgtggcggcttcctggccctctgtggcggcgttttccgcttcggtggtatctttctccacttctaccgtttcaacggtctggacggtagggtaaacggctccattcttgattttctgccctgctgccacctctgcacaaaacataatttttaccgtctttctgtcctctgacaattcaatgaccgggcacataatccagttctgattttccagtttttcaactgctgccaaccaatcttcctttttcaatttctttttctgcaccagtttaaaggtgtttaccaggtcggacttggttttgattactttaggaaatcctttcatgtgttatacctcactttcttttaataaatacgttcccatgtaattgccgatataggccatattggtgccctcacgcaaggaaaccgtggttgtgtgcataaggtccatataatctatggaaagccgctttggcgttaccataacgctttccatattggtttccagggtatagtccccggcttccgtgatgtaaaagcctatgccgctttctgtgattgctgccgtctgcaccgttcccgttgtaatgttcgtgagcgttaccgtgaccgccgcctggattgtttccagtaagtagtcaacatttactttgtgggccatgttgtgaaccttggttcttaatccgtcaatttgcaactgcaattttccggccacgtccccggcaagctgctcctgctttgccgcaaaccattcgtcccactgtgccgtccgttccgtttgaaactgttgcaccatagcggtgtactctttgatgaaagcggcatggtctttttccaccgcctttttctcgcttgaaaaccatttgttaaactgggcggaccactgggaaaagtccagttcttcaaactgtgagccgataaagccgcaaaccgtcttgtccggcctttcgtctgtaatgtctgcctgggtaatctcaaccgctccggcggccacatagacacgggccaggctcttttcctggataacatcattattaaccagttccggggcctgcggattgcttgaaaaagcaccctctaagacgtaaatactcggctttctttcggtttcgtcattccttaatacaatgcggtcaatccttggaagcgttccgcttgcctggctcaatgtaagggtcaacggtgcggtattgtggatagtatgtaaattgatatatgcgtacccggtccgggttccgccgtccactgtcacttccatggtgccgcccggtgccgtcacttgcaaatgaccgtatgcaacgccctctttatagaacggggctttgtcctcgttcatgtcctggccgttatacatatgctctttatcatttaggttggtagcattgtaaaaaaatcctcttactgccatggtctttttcctctcctttcctctattcgtcccattttattgttgtgggtagggcgtccccaaaagtaggcaccacatacatacccccatattcgtaaacctcgcaaagttccgtaattctaaggttctgtgcggtgttccactttttcttctttacggtcacaacgtcccccaggtcatagtcttttccgtaggtaaaatttacatctgcttccgcttccgcttcaaagttttcaaatatcttgttttcgttaagaaactcctgcccccttgttttaagggcttctaaatactcggcgtccgtaagggcttctttgtttatgtcctttgcgtccagaaacacttcccgtaaatcaaacccggttccgccgcccacggttacaaagatacgggccaggccgtccccggctccgcccacaattaccttggtcttataggttgcgtcactgtaattatgttttgcctggtttagattgtcgtaactctctgaaaatatgaccctgggattttccccttgtgcctgggtgcggtccacacctttgtaagtttcaaaggtcatggtcttttttttgaagtccggcacaatacggaaacctatctctgcaaacttcgccaacttcgtgaagtattccaggacattcttataagttgcctggaattgcacttttgtggtgtccccggtcgtggtcccaatctgtaaaagcggtatttgctccatgcgtccaatcatgtagtgcatggccgcttccacggttccgttaaaattaaactgcggacccgtcaaccggtcccccaggtagacgggaagaaaaaagccgttcctggtaatctcatttaccagggtgctttcctcttccgcctggtccccacgtatcacggcggcttcctgcttgttgtcccccttggttataatgttccccggttgcaatagccgtaaattttccgccgttaccggacaatgtaactcaaatgtgccacattcgtaatattttcggtgccactgtaaagacgtgtgattttcgatatgccccaggcgtctaaggttccggtcataaacgtgtatttccataatcacacccccaaatatgaaattctgtaatataccgacacggaaaggtaattggtgccctcgtccgccgtgtatgtcaatgtattggttccgtcctgcaactggataaattccccgtcctcgtccagatattcgtttattaccgtcccgtatttttcaataacggtgtcccagtcaatgaccccgtagttgtctttgtggttctcaatctccgcctgggtcacgccgtccaaaaggtaggcgtttttcttcccggtgtaggtatttataatcacatactgaccggatgacatgataaaatcattgtccaaatatccaaccttggtaaattctccactttccgtgtggtaaatggccgggttcttcacggctccgtccgcccggaatataaccacaatacctatgttgtccgctccgctctcgttttcaatctcctttaccaaatccgcttcacggtgtccaaatatgcggccctcttccgggaagcacgccggaaaatagaaatcacttacccatgacgccataaccacttcaatgtctgccaagtccttaaaatacgggtctgtacatttaagggaaatggtataatcacgcaccacgcccgttgtggctcccggtatgacactttcaacctcatattctattgccttggcttcgccgtcctctatgtactgcattgttcccgtccgctttatggggaatgtgcggtataaaagattgcggttttctttgtaattgctatccatttccacggtaatgacaatatttctttcctttgcggtggctccctggtaggtgctgccgtccgtggttgtgttctcgcttgttaccacgttgctttcaatgccgtaaatcccctcaatatctaccaggtggaacggcgtaaaatcgtcccaggtaaaggtaagggacacgtttttgtcactggtgcaaaccactttaatgtctgacattttcccttaccccctttgtactgccaaaatcatgcttcttgtctgtaacctggtctgtctcgctatctcatacgggcttaatgccttggggcttgtgatgttcacattctgaacatacccaccgccgcctttttctgcgttttccatggcctggttctttgcactgccggaaagcggcgttacaactgcctttccgtttaccatgctaagaagttccgggcctgcttccgctaccatggcggtgccctctttcaatacgccgccttttgccagtctcggcaaagaaagcgtgcctatctttcccagtgaaacgcccggtatctcgttgattacatcaataacaccatttatcattccgataaacttatttacaacgccctctatggtagaaagacaactgtttattgctgatttaaaagcgtccccaaccgccgaaccgatttttacgcccacatctacaaaacagcctttgattttttcccacaagccggaaaagaaagaagtcacattggcaaaggcgtttttaatatttgtccatgcgttttgaaactgcgtaccgaaccaggacgggacggcggaaagggcggtttttatttccgtccaccttgcaccgaaccaggaaccgattgcagagaaaacatttttcacattggtgtaggcgttggtaaacatggtaaggaaccatgacgccaccgttgccagggcgttctttatatcctgccaccttgcaccgaaccactggccgattaaggcaaagacgtttttcacgttggtgtaggcgttggtaaacatggtaaggaaccaggacgccaccgttgccagggcgttctttatatcctgccaccttgcaccgaaccactggccgattaaggcaaagacgtttttcacgttggtgtaggcgttggtaaacatggtaaggaaccaggacgccaccgttgccagggcgttctttatatcctgccaccgggcaccgaaccactggccgattgtcgcaaatacacccgtcacaccgttataggcttccgtaaatctcgcaataaaccaccggcccacaccctggaatatggatacaatgccgttccacaaattttgaaaaaactgctttatattttgcacaaaattgtccacaaattcacggaaagcaccgcaattatcatagagaagtttaaaagccccggcaaacgggtttacaatcaataataaaagggcctgccagttgctttttatgaaatttataaaaccgttaaaggcgtttggtatcgtaacggtaaaaaagtccgctattgcaccgaaaacttttgacgccgcttcttttactgcttcccataccgctattactttgtttctaaaatcttcgttggttgcaaaaagcgtcactaatgcggccaccagtgcggctaccaccgttatgacaatgcctatcggattggcggccattactgtatttaaaattttctgtgctatggttacgccctcggttgttgctttccatacttttattgccgccactagcccttgtatcatagttaccacattccacgccaacattccggcggcaatcccggcaataatagaaataatttgtgtcccgttcctcgacataaaagaaataaaatcttttaccttgctcactactgcaagcacaagtgttttgacttccggtatctttccttttacctctttgattacgtcacttattacgggctttagttcttcgcctatcggctttacaaggtccgttttaaggtttctgcctaactcttcaatctgatttcccaggtcattgtatttattctcatttatcgttcccagtgcgtcattggttgccgatatttccccttgcgtgtccactaaggcacgtatggcgtcctctcccaaatcttcccacttggttccgtacattgccacgcccaaaaggtttctttgtacttcgtcatcacatgagaaaagggcttcatttacggttttaaatgcttcttttgccccctctccgccttgtgcaaactttgtttttaaatcgtccacgtcaaggcccaactgtttaaatgcttcgtctgatgttccgtcttttgctctgataccaaactctttcacggcgtcatttaaatagtctatctggaaagtgccgtttttggctccgttggctatcatgttaaatgcttcctctgctgacaatcccatgtctgcatagtaaacagaatattccgccaactggtccgccaaatctccgttttggttcaatcctttttgtgccccctgggctaaaaggttgtatgcttcctctgatgatatgccgaattgtttcatcatggcgtttgcgcccctaatgctttcgttcacatcaatatcaaaggtatcacgcattaaaatggcgttttccgttgtgtttttcagttcttccccggtctgtccggtctgctgcttaactgcggacattgccaatgcaatgtcgttaatgtcctcgccaaaattatctttataaatgcttaaaagggtttcttccaacccctcaacttctgtgtctgccgcccccgtctgcgtaataacagtatttaaagccttgtcacaatctgtttcaaatttcgtggcatatgtagcggcggcaacaaaaccggcccccatggctttggctgccgtttctgcctttccggccaaatctcccagggtttctttaaaatccccggccttttcctctgcttctttcagtttttcgccggaaagtttggaagatttccctaactcttcaatggccgtgtctgtctgcctggccgcttcctctaaatttgcaagttctacttctgttcttcccagttctctttttaaggctttgtactgctcttctgaaacctcgccttttttaaattgctcctgcacctggctttctgcatttttcagaatatccagtttttccttggtttcagaaatagcgtctgtcaaaagggcttgcttttgtgccaacatttccgtgttggttgggtcgatttttaaaagtttatttacttccctaagttcaacttgcgttccctttacctttttatcaacgcttcccagggccttgtccagttttgtagtatcgccgccaatctcaatagtaattcctctgattttgctatttgccacttcttagccccctttctttctaaaattctttcgcaatccctcacggtccggcttcgtctgctccattctccaacaatttctaaggtattcccgtccctcgtctgtttttgaattttcaaaaatcattgcttcacgcatgaaaaacaaatacacatctatttccatttcttggacttcgtaaatgtcgatatggcaataatccattaccagtttttccgggcgtgtagatagcgtatatggtatctcgtcccctttatcctggcgtggataaaagggcataattagtttgggttctgttttaactcattcacaaattccatataggcgttaagaatggcggtacactcttcaatgtcatagtccgccacgtcctcttccgttaccggaaccttgcccatattattgtttaaaactgctgccacaaggcggtaaattgcttccgtgtcctctgcggtagcgttgtcctcgtccatgtccgggatttccttaattgcttcaaaaactttcttctgcggcatacggaccacaattttctttcctttttccaccacattgccgttttcgtccaccttatcctttaaagtaaaaggccagaacgtcctttttaacttgttacaattaaattcctttactgccatggtctttttctcctttcaaaataagcggcctggggttccgctccctggccgctcttactgtccttactctccgcttgcggcggtaacgtccatttcttcctggtaggtaatcaatgtgccctctttgtccatgggctgggctttaaactctgcgtcaatgaccgtttcgctgtcttttgcaaaggcaatcgtaaatccggcctggttgtttcctacaatggttactcttatatctccgtccacattatccttatggacaaagtgaataacataacgttttccgtccgcatttcccacaccgccaatttttacagtgcggattttctttgtcgggtcctcggtcactcttgcggtctgacacaactttttcaatgtctctccgcaccatgtcataatgccggatttaaatgttgcttcctcttccgtaaggataactttggaaactttgcccatatcgtccttggcttcgtagaaagagggtgcatactcgatttctgcaccgcctttgatatggcccaggcggttttcctcggattccaatacttcgttgctcggcaactccgcatttgttcccataaactcggtacaatataaatcgccggaacccaaaacaatgctttctttgttcatgctctgtttactcctttcgtttttgtcaataatccccggacttcatacgccgtttggaaacattcctcgtccgggataggtgccaccaatacgtcatattccacgtccggcaacacttccgcttcaaatgcttttgccaggtcctcacgttcctggttgtcctgctgtgtataaagttcaaagtcaacgtcctgtgcttttaggttgttaaacccgtccgcccctcttcccgtctcatgtgaagatagccaaaccatgtatggaagttccggcaccgggtcatcaagcgttccctcaaactggtttttagttattggcacgccgtatttttttgaaaattcttttgccctatccaccaaaatgcttacatttacggtcatgttatcccctcactttctgacggatttttgaaacggccaaatctcccagggtttcgtttactggtgcaatgtgttcaaacgcctttacatttcctactttcctgccgcccttgcgtaactggtgccctttttccagtaaatgggtcaactgatagtgttttttgttgtagacactgtacccatttaatccggtaataacgcttgtcctgctgcccctttggtcgtgcgtccagtccttggtatattttcccgttctttcccggtaagggccgccccgtctcaaactttcggcggctgcggctgccgtttcttccaggctttcatttaccgcacgtcttaattccccattgctccaattttccagttcgttctttatggcttcgtctaacccgtcaatgtccgttctcaacttttgcctatcctttccccggcataaagttcaacctttccggtgttcttcggtccatacgtccggtagattgccattttcctgccgtccaccataatttccgtctgaccctcatactcaaatccccatacttcaatcatcatggacgctttataacctttttgcctggctgccgtaaactcgtcacggcctaccgggttgatttctgcaaatacctctttttccaggtattccgtttgattttttttaactaacagtgtcactattgcttctatggtagccgccccctttgattttcgtacaaatcatgtcatacgccgccattaactcgccgtggttctccgggtttccaaaattggcctttgcatacaccagggcggcttcaataatcaacgggtctgtgatgtttttcgggtccaggtaggaagaatgtacgccgatacgtttaaggtctgccagtgcaacatttataagctgctccacatcttcgtccagggtatcggcggacattttacgcaacctcaactttgctttcgctatcagttcagttttattcattgtccgccgcctttctcatgccgtccttacgcctgtgcgttcttcacacggataaagccgtttttcgccaccacgttgccgcccatgaatacgcaagccttataggcaatctgtccctgcttgaatttgtattctgtggatttctgtgcgtcaacgtcggaaaagattgcaacctcgtaattgctcaacgggccgtatgccatgcaataggctcctgcggtgccgccaacttctccgcaagcggaattgatgatataaggcacctcgtcaatggttcccgtgttgccgtggttcacaatggtgtagactttacgcccctgcttatccctcaactttgcaaactttttaaggtctttcttgttgaggattaacacggcaatgtcttccacatcttcgtccccaccgaaagagtaaataatctcgtccagtgtatcgtctgcaatggcggtaatcgttgtaatgtccgtgttgcggtcaataatatcgtccgccgcctttgccggattgaagaaaataccacggaattttccggtttcgccgggtcctaccaaaatctgacgggaagcgtaacgcttaattgcacgggtcacgctctcttccaccacgccgtcataatcggcgtctgtcaatttctgcatttcttccggttcctctgcgtatgccgtgattttctcacgtacaatgtcggaataaccaaattccggttcggacgtgttgtaatctgcgttttctgcggtgcttccggctccgtccccgtaggacttcacaaagggacgctgataactttctccacctaccaggggaacagtctttactctgtcaatgagggaagatacattgttgaacgttggggaaatgtccgggcttgtgtgcttcggcattactacgcccgtggccgttgtaagggtgttcttaatccctgccagtgccttgcccttaaaaaacgcctttttcccgtcctttaaggtcttgcccctctttgctctctcctggtcctgcggctctccgctgccctctcctgctccgtctccctcgtccgggtctgcggctcccgctgcccttgcggcggcttccagttcttcccggcctttgatttcgtccaaaatctcgcctatggtccttgcttcgtccatggcgtccgtcaactcctggccggaaagcgtctgtgcgttctttcccagttcggccagtctgtttttaaggtcctttttggacattttcagtaattcttctcttgtcatgtctctaatctcctttcatatcttcttactggcccatgtgtgccatagtaagttcaataattttgtttcgcttctctcggtcctgctgccctgcgtggttttccccggaaagaagtttttgcggtacattgtggcaataaaactttgtgtagtcctggacggctgcggctatggtgttttcctcgcctacctttacccggaaatactgggcggcctgggtgccatttaaccaggtttccgcttccatgagttcttttattgtctcaatggttacgccctcggccaaatgctcttcataaatcgcccaaattccgctttccacggcgtccagggtgtccgccattttccgcaactccgtggcgttcccgtcacaaaccgcccacggcttatgtatcatcaaataggcgttggacgggattgttggcatatcgctgtccgcaaatgcaattacggaagcaatggacccggccagggcgtcaacatacacggttttctttcctgtgtagcgtttcagcatattgtaaatggctattccggcaaatacggaaccgccgccggaattgatgtagatattcaaatcttttcccccggcttctgccaggaaattcttgattgcttccgggtactggtcctcttcctgccaggctccccaccaatcacttacaatgtccccgtaaaaataaaggtccacgcttgtgtccgttgcgttcttaaactcataaaacttcccaaccgtggcctttgccgggtctttgcaaagtttcaaaatgcttggtgctttcggcatatccttaaccccctttcatagtctgaaaataggcacgtgcggcggcttccattgccctgcgttgtttgtcctgctgcgtccctgggtccggcggtgggtcattgcttccgccgccctgccctacttggtaaaggctttggtccccggcttttacgtagttgagtgataccattctcacgtccccgtcatctaccggaccgtaatacataagtgcccggtattcgtttattgtcatggctccacggtcaaacatatttccgccgattgtgtcacgtgtctgtaatgtggcatactgcaaaagattggccgtaaactctatcttgttcccgtatcctatttcccttggcgtcaaaagtttaaaagtaaactcataacttaattggatagcgataggctcaatcacgttttcataaaaactaatccattcctggtctgaaagggtggaagtcaataccttttcatttactccgtaatagcggtagacgttatcacgtaggaatgtaatttgatttactggcacgtttggcgtgcgttgcacaatctctttaaattccaccgtactatctattgcggcaatacccccggcgttttccgctcccatataggcgtcctggaagtccttggcaatctgctttagttcttcgttatctgccaggttgttgtatttcagatacccggccagtgagttagaacggtttacaatgttctttacgatttccccggacgtttccacaaggtccaggctccgctttaactcaatatccggggaagtccccaaaaaccgttttttattgtatcttgcctttatgtgtattacattctgataaggcaccgtataagtttccccgtcataatcccaccggaagcggaaaaggatatggtgcttgtcatcttcaaaaatgcggaaactctttgtagtgattggttgtatgctctgtacccttgtaaaatcctcgttgtagaaaatcacggaaaaggaattggaagtataaaccaggtccgccgcaattctgtaaagaaaatcatacgttgacatttccgggcatggccgcaaggtcaaaatccgggccaggtaatcgttttttatcgtcattcccttttcgtcctttcggacaacctggggttgtaactttcctacgttcttggctatggcgtccgcaatggctcccacaatatcattgtcccgtaaggttcccgttggcacatactccccacggctcaataaaagcggtctgtattttgccttaaaggctccgaatacgtttgctataattcccgtatcattaccccctttcctcaaaaaataagcccatggaacacgtccatggacctattgtaaaattattcgtgttgaaattctgacccactttaaaaccctgctgccgggcggccatttatgccgcttcattcaaaagttttttgcctatctcactatggtattttgataccattgtcatagcgtcaaagacggaaacggccccgtctatcctcatacgcttttcaatcttcacgggcttcatgcggctatcattcatattgatttccacggccacgttaagaagatgtgacgccaaaagggtgttgtcccctaggttatactttccgtcctttaaatccccctcaaactggtgtaggattggcgttaagttcgtgccctggtaaacgtcatctgtttggaacccggccatttttaggtcatccaccaaatacccggcactgtaacggtcatagccgatttttaacgggcggattttgtaaaccttaaccagttctatgaaccagttatacacgtccttataatccacctggttttccccggatatttgcaaaaatcctttttctttgtatatgttgtacggcgtgttatcctcattcactgccacttcataccgcttctttggcatatagaattttgtaatcacattccattttccattcttccaaataacgattgacgccgccgttaagtccgttgtcctggaaaggtctatgccgccaacacaatagcacccccggaattgttccagggtaaggcgtaagtcctcatttaccgctttcataacgtcccagtaatccaaccacgccacactggaattttgcttgatattgcaatactttgtaagaaactccactttctttgaaagggacgcttttgcaatctctatctgctctatgtaaaattcctctgatactgacacgcccaggttcggattactctttttcaattcctctaaatcgtcccaggcttcgatattgtcaatcatgtagaggaacggcaatattcttgtttccttggaattgccctttaagaatgacgttgaacgccgcatgagttcatcataaataccgtcattgatatatccggcggttgatatggataaaataagcggctgctttctcgcccccagtgcggaagtcataacctcatactgctttagtccctggtccccctgccatgcttccatttcgtcattgacaaccatttgagggttgaaaccgtccgactttttggagttaaaggctatctttttcacactggtattaaattcttttatataaatatcgctgcggcgtttcttggttatactgtccagttcgtcatctgcctggacaatctggtaaaaggcgtcatacacaaggtccgcctggtccagtttcggggcaaggaaatagacctttgccccatactcgccgtctatatatgccatgtatgccgcaatagcggcggcaaacaatgttttaccgttcttacgtgctacaactatgaaaacttcccggaattgcctataaccggtccgcttgtccattatgccaaaaatggccgaaactatggccttttgccacaattcaagttttaataaatcgtttcgtccctctgaatgatgacaaaagttttctatgaagtttatagccttattggccttttcctcgtcaaaatcccatttgccactttttaaaccattcacaaggatttcataaatggtctttatccactttcctactgttacggtgccgttttgtatggcttcccaatactggaaaatgtaattgttatccattccgtaatgctgccagtctgcttatatttttcttttcttttggcggcaaatactcaataagcgtgtgaataattgccgtatattggcgtgaatatttctcgtaaatcgtggctgacgggtgggcttttacaaatttctgtgaagcgtttaccgtttccgttgtaagcccctcttttttcaattcttctttcgcctggaagcaagccacttttaaaaatgctgcttcctcaacaagtgaatttacaaggcttttcttgtcctcgtcatctattccggcaaacatgggcgtaagaaattctatctctttctttatcctcgcatttgtgagtttatttgttctttttttcgctttcttctcgttactttttgtttcttctgccatattttgacccccctcatatgcgtgcgaccctgcggagtttttttgaagtatctccctcggttcttatgggggtgtccaaaatcaacccaccggggggagtggtctgccgcttttcttcttttggcggtaataattttccgtcactgtcaaaccgataacgattgttaggctttgccttatgctctttgttatggcaatcctcacaaagatattccaggttgtccacgtcaagggtcacgcctgggttgtggatattctccggcgtaatgtaatccttgtggtggacaatcacaccgggacgataaagcccggcggctctgcaccgctcacacaatccattggcccgtttaataactgtctgcctggctctcttccatgctgctgacttgtagaagtcctttgcatattctttcatctgctgccaccgtcctttccctcatgctgataggctcatgggtaaaccctacccacaagcctatgttaatataaaacactctgacattctgacccacttgctttgtgtcctgctgccgcctggttatttccccacaatggggataaactgaaacgtccacgcttcatcatggattgaaataatattaccgtcctcattgattgccagtatatcaataaacttcggtttcaaaaccatgtcccttttatcccactccacattctccggcatatgcacttccataagtgctattgcattaaatactttgtccccatgcactactttaaatctgcttaaatcaattcccatgttcctgcccctttctgctccggtagcatatccatggcggacgctacccgtttaataaattcctggcggtattcatagaattggcggcggccacacaaggcgtctgctatgtactcataaggcatattataaacaatgctcttataaatcttctcctgcatttgccgccgtacccggacgctttcaatattcccacacgtaccacgcaaggcattttctacaacctgggcggcctgcaaatcaaaggcacttgcctggccgttctttattctcttttttctcttctcgttgccttgtatgatactacgggctatcgttttaatatcggcgtccagttttaccaatcctctgcacccccgttactcttcatagattttcttggaagtctctgacctctccacctttatgctttctttcgccattttggaaacctttgcttttacaccctggcctacgtcaatggttattcctttcatgtgttttgcttctatggcgtccaccacgttaagcatgaccgtaactacatcctggtctatgggtctttctgcggtgcttccgaaaagttccgttatgcggctctttgctttttggacccgctctttactttctgcgtacttcttggcggcgtcacactcacacttgcacgtcatggcttcgtccacatcttcctggctccacccggtcaatgtatgaaccattccggcttggccgcaaaaacggcaatatcccgtttggctctccactccgtccggcatttcccggtcctcttcctgctccatttcccttaaatcctcttccggtatcttatgaccgccgtctgtccgtttttttgtcatggcttaatctcctttcttttccgcccgtttataggcttccatggcaacggtaagcaccgccgccgattgtttgaccgtcaactgctgcccctttaccaaaagggctaggttttggtttatggtttctaaggtttcccccagggaaagcccttttaacggcttcccggtggaaagatttacgatagccgttataatcggccttttaaatgtgccgtcaactgctgccatgttggcttccaatgtagcttccgcctttgtcggtgcgtgtttctcgcaattccggcaaggctcacggctgaacatacgccccaccactggcacaccgtcacaacgtccgttaatccacggggcatttaaacacttggaaagcggcattttgtccgggtcctgcaaataatccatgatttccgcctttgcttcgtccgctccatagcacaccgccgttttatagccctgctgccgcaaggccgccataaaggcttcctggtctttcgtgggcttattctgcccgtatttcatttccaggtaaaggccattgaaattgtggcttggcactggcaagcatacgtccggcacaccgctctttaaacccatggcctttaatactgccccgtttgtcctctttccctcgtttggaatgtgatacatgagggaaaggcacggtaaaacatgcttgttattctctgcccagttaaaaagcgttatttgttccgtggtttcccctctcttcatgttctgcaatttcatgtataaacccccttaaccctcttcaatggcgtattcccgtttacgccgcttgcaatcttccaacatacgttccaaaatgcccacttcctcgtcatttaaccaggtataatatttttcaatcatctttacggcgtgcaacttcctggcgttttccttttcttcctcggttgtgtcggtatctgacacactggcttccctggtttcctcttcctttgtctttcggtgcttcttttcctctgccatggcttttatttcctcggctcccattccgcccttgtcctctgccgcctgggcaatctccttttgtgtgccctcgtccgcttttgccgcttccatggccgccgtaatccccaggttgccgtttttaaactgctctttgacttccggcgtggcgttgtcgtgaatggtgttaagggtccgtatcttcggcactttttcccccatgacggcggccacataatcccggacccgctccccggcttccaggattaaaagcccctctttccttgcctgggtcaatacctctttccactctgcggcctgggtcataaggtcgtaatccgtcattttccggttgaatgtgttacccaccaaaagggcaattctaaattctatttccgtcatgtccttatagcggcatttcacattctcaaacccggcctttccctctgccaccaggattttaataccgcccaggcggcggtggccggaaaccaaccaatattccccgtttacacggcctaatacaaggggctgctgcaacccgtccatttctatgcccgttgctatctcctgcaactcgtccatgctatacttgttatgttttgtaaccacaatatcccggtaatttaccacaatgtcctggtaatccctgttctgtcctgcttccgccttggtggcggcgttcataatgtccaaaatattaaatgccatgcccttaactcctttcccctgctgccggtccgccaaatttctgcacatattccgccgcaaaggctttataatcctgggcggctccgctgcgtatgctataatgcaacggcgttaaacggtaaaatgtggcgtcctttgctttcttggaatgtctgattttttgagagaataccgggcaaccgctctttgcccttatccaattttccgccgcttcgcttgtgtctgatttctcatagtctgttatgaggaccccggcaagcctggttttgggattgagtgcccttatctggtttatttgctccaccaactcttccaggccgtccagtgaataggcgtcaaggcacacgggtattattatttcatctgccgccaccattgcgtttattacattcatgcccaaatccggcggattgtcgataatgcaaaaatcatattgtccggacacttcccccagggcggttttataacggtcatgctgtgcgtgttcctggtctgcctttatggcaagttctgtcaactccatgaaataattacacgtcacaatgtccatgttctccacttcggtgtctctgatattcccggcaattcgtccggtcttaataatccggcacgccccggcttcctgctccctctcatacgctccgaaaatccgggaagtgttgccctgcttgtcattgtcaaataacaataccctgctgccaggccgttttcttctcttgtccccctctgccagtaattccgcaagggacacggcggttgtggtcttggcaactccgccctttaagttaataattgctactgttttcatttcctttgtctcgctcctttcgctcctgcttttaccatacgggcgtaaatataaaacgccgcattgtagccgttgtacttaacctctgcgtccaggaatttataacctgggtaagccttttccatttgtgcctttaactcttcaaaatcctttgccattctctcaaccccggcttttctgaattttgaataactgcggcttggttccggcggcttctgtaaattcttagacgggcaccaccgctttgtcccgtgtgggttctgcgttatgtatgtggcaaggccagttattaaaaaatcgtcatccggttttatccggcgtgtgttcggtctgtcacattttccccataattcttctaactcgtcccggtccaccccgtccccggataacagaatgtggaagtgtggccttttgtagccgtccattgccaggatataaatatactttgcattttcaagcccggcctttttcctgcggcggtttatccgcttgataaaattctgtatatctttcctggctctctcttcactatccggcaaacaatcatcattccacccaaacgtggcccaaatatcccctttcccaaaattgatatttgccaggcgtatgagataacgccgggcgttcttgtcgtttaggttcttctgtgacggtctggtttcccttttctgctttgtcactggcacgtcctttttgtccttaaaggacgggtacacctgggcttctaacagaatggtgccgcttttgatgttctcggacttggttgtggttgtcctataaaggcactccacctttccgtctttcatcaacttttccatttcccattcttccaggttcgctatttgcttttggtatgcttcctcataatcgtagttgtcatagagtttttttttcatagttccccacctttatgtaaaacccctctcccctttccctctgcctgggtcccttatgccctatataaataatttcaatagggtgtccagtttgttaatacccattacaaggacggggaagcggtgccgctctatctaaaaaatcagtcaaataattcgttccaggctttcgctactaccgcataagtaaaaatgcccttggctgccaaaatcaatattgcggctcctgctgccgctaaaataatccgtatcgccatgattgccgcctttcttcctatatatagaaaaaaccgctttatttcctctatatcttgtgttataatatgggtgttaagttccaacccggttgttttggttccccaccttgcaaccgggtttcgctttgcccttatttaatccctgcttctctcatttccttttgtatcgcctggatttcctcatgtgattttttccattttgatatgtagccctcgcaatccggcgttcctcttaatttgcttatctttgcaccgccggaatgtcctgccagtcttgaaaggtgcttgctacaattcgtattaaggcaacggttgtcacaaaatctcggaaaattatctgtatttacaaaaattaaaggtctgcccatggattacacgccctcgctttcccaaaagtatttatttacaatcagcatttccttggaagtaattagcactattcccattggaaccagaataaacgcaactgttatatccccctctaatagctttactgaaaccgccgtaagaataagcattgccacaccgtagagtttttgggtaaggaaatacctctttcttttttggcgttctctcgctttctgtctcttttcccgttccctcaactctgcggccatgtacccctctatgtatgccgcttcctgcaaggctctaattgctctattttcttccgtaattgatatttttaaccgttccgcttgtactgccatattaagttcctcgctttcctgctactggtttacatactcgcccacaatgtccaccactttgtccataatggcttccaactcgcttacgctcatggccttatcatctatgtaaaaatccgcataaacctttcttgtgtcattcccccaccttgccacctgctccggcaaaggctcattcacggcgtcaaactctaagccctggctgtggcaccattccactgccgcttccaggtcacgccctgccctgcttgtccaaagaatgaccttgtggccgtttgctttgagcattttaaccgccgctactacctttcgtttcggctccacgatttccggaaacctggtaactgccagtgtgccgtcaaaatcaaccgcataaatcgccatgtgtgttttctcctttctctcctgcctttgcccctaggctcatttcatactttaaaagcatggctgccgtctgcaccatttcgcaagcggcgtcaatggcctggtggaaaattgccgttggtgtggtatcttcgcccaggaagcacgccacttctatgccttttacccggtcccaaaggacggccagggaagtttttacattttccattgcttcctgggtttcctctgcttcctctaaaatgacggcatagccctcatgtgtgctattgaataagggaaactttgcatttgcccggtttaattccgccattgcggcggcttccacttcttttcttaactcattcattgccattgtccggttcctcgctttcctcttcactctccatttcgtggcttttctcgtcctgtgtgtccgcttccgtgtattggctcccgtcctcgcactcccggcatttatccatgtccattcttacgggctttgtatttccgcacgtccggcaactccaacaatcacggccctggtggttgccctcttccggttctcctgctgccacatggcctttcttactcctaaaatctatacatacgttaattggcggcatttttgccatggcttccatggtgtttcccatttcttcaaatgctgcttcaaacttctttctgtattcttcttggtttcccttaatcgtccttaattcgtcaatgcggtttaattccagggtgtcaataaggcggtgcagggaagcggcggcactctccacgccgttttcttccgtccatgcttcaaatacggcaacaaccgccccggtaatctgctcatattctgcatgaaaacccatgtcctcttcctctgctttcagttcgttaagaaattccggcttttctccggtaatcattgcctggatataaaagcccggcacttccgcttttaccgcattgctcaacaattccgcttttgccgcttctttcataaggttgtaatattccgtgtgcttcatgtccacggtaccgtcacttgtaagtccgtccataaatcccatgttaaattcctcgctttcttatctgtgaattggtgttgtgaaatgataaagtggtgggtcattttccaccgcttcacggtttttgtaaatcataagggtaaaacggtcctggccctcttcgtccggttcccggcgtgcgactgcttcaaatccataacgggcgttaagtttcgccccgtatacggtatctgtcaattttgcaatctcacggctgcccagtgtcacgccctgggcggctaactgctgccaccgcttaaatgtcttgtccaggtattccaaaaaatccggctccacaattccgtttaatggtgtcgcactcttttccatgttcttttcctcgctttcccggtcctatgaccgtttacccaggcacgccgccgcataattttctttatcctggcaagcctggccttaaattccggtaaatcttcaatttttaccgttattgtcatttctgccatgtctcgttctcctataaataaatggtgttatataggctcatctgcaaatctgaaaaggaatattccggcgtttcctgcggttgcaacggtgccataagcccacgtttttgccattccttatgtcttatttccggcgtaggtctgaaccgcttaacctctgcgtccataagtgcttccatgttcccggcgtgtgccatgagagccaggaaccccgtataaacgtccttttcattctttacaatccgtaatctgtccgattgttcaaatacggtcagaaattcccgtaacttcataacggccacccgtacttgtgaaaataaatggaagcacacacaaaggcaattatcataaccacgcccaggacaccaaagaaaatacggcggcctttggggttttcatttgcacccattgaatagataatggctaacccggccagtgccaggtataaaattactccgccgcctatgactatcaacaaaattacaatcaataaaaatacttctaaatttgtcatgctctgttttcctcgctttccgctttctttatgccgataaaaacacgctccgcacatggaaccgctatactattgcccagtgccatgtaacgggcattgtcggacatttctttgccgcttgccccgtaccttgtccattcgtccgggaacccgtccaggcgttcacattcaagcggcgtaaggcggcggacccggtatttaaccgctgcggcaatccgctccattatcacggcaagggtttcacttccgccccctgcctcccctcggctctttttcaacgtgcccacgccctctttaaactctccatagccgcttgcgttatatgctacaacgtgcctgtctgatgtggttaaggttgggcatattcccgtatcatcaatcccttttccgtttccgccggccttttcactcctgccaataatgtttcctataattgtgtaagtaggaagtaaatataagcccgttttcccaccgccgcccccggcgtttcccatgagcgttacacttgttttgtcatttatgtaaattctgtcggcggtgcggccaaaatctaatttcatttgtccgtctgcgtcctctgccattcctctgcaatccgttccagtaaggctattttcagaattaccggaatttccttgttcctctgctccgccctgcgaatgataccccaacatgctttcgcactcaaaaagtatttgtccggcacgtccatttccaaaatcattgacaaggtagatacgttttctacgttggggcactccccaaaattgagcgtcaagcaatcgccatgcggtacactgaacgtcccccctggtccctcatttccaaccattccggcggttgcccatttcccacttttaggcattgaaatgttgctctgtgtgatttcttccaggacccggcggaagtcctcgcctttattgcttgaaaaagccccggccacattttcccaaatgatatattttggatattgtccatttgtcttttccctcatttccctggttattctcacggcttccatgaataagccggaacgggaaccgtcaagccccgtctgttttccggcaacgctcaaatcctggcaagggcttccaaaactgataatatccacaacggggattttcgccccgtctatctgcgtaatgtctcccagttgtatggcttccgggaagtgccgctttgctatgtctatacaattcggctctatctcgcttacccataccgttttgataccctgccgactggccgccaatgggaacccggctattccgtcaaaaagacttcccagtgtcatttcggccgtggttttcatatccatatcctctttccatattccggcgtaaattccggtattgtatttttctcctgcttcccggtttccgcttcactgtaatatttctctttctcctgcctggaaaagaaaacggtccttgttggtattccggcggcgtccagtttcgcctttatttcccgtgtctcttctctataaaaccgctccatgtggtccgctactggtttggtgtaatctaagggcggttttgatacattcaataagtcccgtaatatttccgccgtggttcttccgctccgtctatatgttgtgttggcaataaatgttttctgccaaataaacagtttaaagcccagggctttttctactgccgcaaatgtcttttccagttccggggaaaagtttgttggtgcataaatccattccggtattttttccatgttaagttcctcgcttcctaaattcattaccctggtataagtgcggaatattccgttttaaacccggctatttcttttcctctcataatcggaattactgccacctggtatttgatacccgttaccgtgtcccatgaccgtgtatttttctctaattccttgttgattttctccgccaatccgcccggcgtttcgtctcttaaaattttcacaatgcacttgctcatactaaagcccctcgcccctttctattcgtccaccagctcttccgtttggataatttttataattgagactttcggcgtaaagcaatttgttacatagccgcttccctctgcaatcttgttttccaatgcttccgcaaagagtttagcgttatgctctgctgaaaatctcccggccacatactcttctatgcgtccgctgcttacctgggtttcttccccgtcctcgtcataatcgcaaaacgggatttcctgggtaactcgcacctggtaaagcgttctttgcttcatgttaagttcctcgctttcctgccctgctgccgggcggcgttttggccgccccgtggattatttgataaattctaaaaggtttatctgcttcttggtgcttacgctaatttaaaaacgttatacaaaaaatttccctcgctatcgtgtacggtttccacctttgtgagtttttcaagggcttcgctcattggcgtcccgtaggttccacgctcccaaagtcccgatttttcagccatatcccaaaaacaacccgtgtatattccgccaccgtctggaacatgctttttaaaagttgcttttataaaattctcgcaccattctactttaatctgcttcatgttaagttcctcgctttctgccctgctgccgggcggcatttataacgctctctgtgctatttctgcacggtaaggctctccgccacgcttcaattcattgtagatagtggcccggtgtactcccaccgcctgggcaatctctgtaacctttgccccggatttcttcatactctcaatccgctgcctatctgcataattaagccgcttcgctccttttctcatgtccaaccacctttctttctgttttcttcgcaataaaaaaagagtgccacaagagttttattctcttgttacactctttgattttctgtataaaaaatcaaatgcgatagagtattaacccttgtcgcatttgattttacaacttagcaattttatccattttctagcacattattttgttttattcgttttccatcccctggcttactgtcttacccggaacatctgagcagctcctgaagctttttcatggatcggttatactttgacagtaccgtagctaatggcatctggagcgcctccgccacttcccggtgcttcatgcctgcggctgcgtgaagaagtacaatctgccgctcctcacggctgattcggcccagggcgtcaagcagcaccttacggtccgcggcctgttccaggggggcgcagtactccccctcctctttctcagccaggtcctccagagccacgtccgccttcatcttctgctccctgaagcgcatatagcaaagattcctggctatggtgaatacccaggccagaggcttgccctgggggacataggaccctgccttggtccacacggtcagataggtgtcctgcatcacatcctcggcctcctccggattcctggtcagggacaggataaagctgtacacaggcctggccgtgtcctggtaaaagaggtggaacgcctccatatccccatctcccatggcctctatcatctcttcctgtgtcatccagcgtcccccttccaggaccagcccggcgcccatatcaagcttactcccggctttccgagataaagctgttttccatggttatgacgcagcagcagcgcctgtcttttttcgccacgtcctcagtgatccttgctttcagtttacccagaaccgatggcttatattccctgggaaccaccaaatcaaagatcaggttgatgcgctccacgccgtccaccatcctgaagtcgtggaacgtaagcctgctgtctattccgtccagaacagacgtcactaactccttaaactctactaccctctcgtcgtgggtctccaccgggtccatatggataaccagcagaattcccatccgcctcatggcctcccgctcaatgcggtcaatgatttcatgtgtgcgctccacgtcgcagtcattgggcacctctgcatgaatggatgccatgcttcgcgaagggccgtaattatgtacaatcaaatcatgactgcccacaattccgtcaaagctctccacaaagcttgatattttgtcataaatctcagggtcaatggcttccccaatcaggggcgccagggtatccttggctatgttcacgcctgcgatcattaccaccacagacacgatgagtcccacaataccgtccacattgaatccaaatgccccgtatattccgatggagcatatggtagcggaagtagtgaccacatcgcccagcgcgtctgccgaggtggccagcatcaccttggaattgatacgctttcccagctttttattaaaacaggaaagccacagcttaatggccacagacataaaaagtatcagtatggatatccaccgaaagctcatatcctcaggatgcagtaccttgccaaaggaggtcttaaacagggaaaagcccacctgtatgaccaggaatgccacgataaaggctgcgatatattctattctgccgtgaccaaagggatggtcgtcatccgcaggtttttccgccattttgactcccacgaatccaataatggaggaagccgcatccgacagattattaaacgcatccgccataacagatatactgtgcaccaggatgccgatacaaagcttggatacaaaaagaagcaggttacagccgattcccaccatgctggtcagtgtcccataagccgtccttacacgtacatcctccacattgtcatgatctttaacaaatcgtttcactaaaaatccagtcatatcaaatcaccatactccactttttccaggaataacccttcaggcggggcggtaaaaccagccatagaacggtccccggcctccagaatagctgccatttcctccggttttcgtttacccgtccccacctctataagggtgcctgataaaatccgtaccatctgctgcaaaaacccattgcccgtaaaggatatatggattctgcttcccatccggtaaaagcagatggattcaatggtgcggattgttgatttcttcattttcttattgccgcagaagcttttataatcatgggttcccgtgagaatggccgctgcctgttccatctttcccacatccagatcctgccccaagccatagtaataataacgctcaaacacattctttttgggagctgtctctatctggtagcggtatgttttcctcaacgcattcaaacggctgtgaaaccgttccggcatcacgcaggcccttgtaacggcaatgtcctccggcaggtaccggttcatatacctcataatctcgtccagggtcatgttcttcgccaaatggaaattagccacctgactttctgcgtggacccccgcgtctgtccgtcctgaaccgtggacctccaccggactgccttccagcttttccagaaccgcctccagcttgccctggatggtcctgtctgtatttccctgcttctgccagccgtcgtatctggtgccgtcataggacagccacactcctatattcattctctgcctccctgccttgccctttcttttttcctgcgcagacaacacagcgcccccacggtaatcgccatccccgcggctgctccgctcatatccagccatacatcgcttatctggccggaccgccctgccacaaagagctgaatcgtctcatccacaaagggaaccataaaaatcatcatcagtacatccctgttaaatatcctgtatcttccatttcccccgcaggccttgaccatcaatcctcccagcaccgcatactctgcaaaatgggctgtttttctgacaatgtgctctgtcagccacagatgctcccagcccagggatatcatggctccccggaatttatccaaaagaaagccgctttcctgggaagagatagtggccggtgtcagggaattaccgtatatgaagcatatatagaccagtatcaccacatgccaccggttcaatgcgggccggttcattacagaccgcttcaatgcaggccgctttaatacaggccggttcctctcatctggcatctaccgtatcccttctgctgtcaggacgccactttctctgacagcccttatagccttattaagcatttcctcatcctggaccagggccagacgcacatatccctcgccggacggaccaaacgcgctgcctggggtaaccattactcctgcccgctctaccagttccatgacaaatgcctctgagctggtataatgttccggaatagcggcccacacaaacatggtggcctccggccgttccatcttccatccaatggatgtaaacccgtcgcacataatatttctgcgcgtctcataggccttccttgtagcctgtacacaggactggtcccctgtaatcgccgcaatggcggcagcctggaccggaaggaacatgccgtagtccatgttggatttaagcagcttcagacgggacaccacctgggaattgccaaggcagaatccgattctggctccggccagaccgtatgtctttgacagggaattaaattccacgccgatctcctttgcccccggaaactgcagaaagcttccgcatgcttttccatcaaaaatcaagtcgctgtaggcattgtcgtgaagcacaatgatgtcatatttcctggcaaaggctatgagttcttcataaaatgaatccggcgccatggccgtggttggattattaggataggacaccaccataagtttggccttcctggccacgtcctcgggaatctcgtccagacggataatatatccattttccttcctctgaggcatgtagtgaagcctggcaccggctatctgcggaccgtcaccaaatacaggataacaggggtccggcacaagcaccacatccccctcatccacgatggacagcgcaatatgggccagtccctcctgggaccccagcagggagcaaatctctgtttcagggtccagctccaccccataccgggtttgataccatccgccggccgcctccagcatctcccttctgtcactgatggcatacacatagttggacggctctgcggcggccctgcacaatgcctccataatatgaggcgcgggcggtatgttaggcgctcctatgctgagatcgataatctcctccccctttgcagtcttttcctttttaatttcagccagttttgaaaaaatcccctctccaaaacggtccatcctttttgcaaatttcatatgactcatccttcctctctgtatagctgcagctgcatctgcccgacataccatgtcccgctcactgcccgctgccggattcctaaaaacccaacaggcaggcaatgattggcaaaaaaacagccggcagcaggtttcctatctttatcttgcttccaaggaccagattcaggcccagaccgaagatcagtatggaaccaatgcaggataccctggttatcatgatatccgtaagaaatggcctcaccagccctgccagcagggtaatactcccctgatagatggccacgggaaaaacggaaaatgcagttcctatgccaagtgctgctgtaaacaccacagacaaaactccatccatcaccgccttggtaaacaaagtattataattatggcttaaaccgtcctccagggaacccacaatggccatggcccccacacaaaacagcagggagctgctgacaaaggcctccacaaaagtccctgatacctgtcctgcgggaatcctggatttgcaccactcccccagctgctgcagcttgtactcaatattaatccattcacccagggcagcgcccgccaccatgcacaccacactcaccagcgtgtcctgtgtctcaaagctgcctccatttatggtcatcagccctttgagagcgcccgtaatgccaacaaacaccacgcacagccccaccgcgctggaaatcgtatcctgcagccgtttgggcagcccgcctttcaataaaagccccacaccgcatccggccagtatgccggccacgttaacaatcgtacctaatcccgccattttacttattcccgcctgttccttacccatttcctaaaacacttttaccggtaatctcgcttacccatttgaatacttttacccattaacaggctaaatcagcccatttcgcctattatagtataattttccagatatgacaagagtccgttaccatgaatgttttgcaccagtactatgaatgttttgcaccagtaccataaatgcctggcatcctttcacagtccagatccagagattctaagcatttggacaagtttataaaaacatataccgccggagctttcacaaaacggcggaaatccccaccagaggatttccgccgtacgcaaagaattcatataaagctacataagcatgactttcacctgttcccccgcctttaaaccgctgcttcctgccgggatatctaccaggcagttacaaccggccatactggacagcatgcccgaagaatggcgcccctcaggcagccatacctttccgtcctctatctttcctcttaccaggcgcctgcagggagatgccttgggaaatggacttttaagtattccaagcagaatctccggcttccactgcgcttttccgcgcatccgttccagcaccggcctcaccagaacctcaaacgtggccgccgccgcaaagggattcccggacaggcagaatacaggcttgccctccactatcattgccagcatgggagaacccggcttaacattgattccgtgaaacagcacatccgctccaagggcttctgccacataaggcatgcagtcccgcacgcccactgatacaccgccgctggtaatcagagcatcgcattccgtcaattgttttctgatttcttcggccagcttctctgtgtcgtctcctccacgttggagaagaaacggcttcattcccagctcccttatcctggcggcaagaagggggccattgctgtcataaatctttcccggctccagaggggttcccacaggcaccagttcatcccccgtggccataatggctaccacaggcacggaatataccggtatggtctcaattccctgacttgaaaggattcctatgtgggaagaatgtatcgaccttcccttttccataagcagtgctcccctgtatgtatcttcgccttctttacaataatttccataagatgcgacggattggtatatctcaacagattcgcttccctcgtcagtccgctcctgcatgataacaccgtccgctccctccggtataggggcgcctgtcataattctggcggcctcccccggacctatctttaatttaggatacataccagcgcagatgtgctcgattacattcagtcttaccggattctcctttgacgcccctgtcgtgtcctggcttctgactgcataaccatccagcggagaccgcgggaagggaggctggtccatgactgcgtatatattttcagcgcacactcttcccaatgcctctgtcacccgtacggtttcagtctcttccttcatcttaatcttcatgaggcgttcctgggcctcctccaacatgattggattcctttttctcatctgcttcctctcccatggcaaatcatatgcaaaaaagccgggaaaccctgatgaatcaaggcccagccaataaaacaaaaaagcgcgagacgggattcgaacccgcggcccccaccttggcaaggtggtgctccacccctgagccactcgcgcatttagtacatatacaattataatacgtaccctcaaaaccacatattgaattccgattgtttcacaaaccttttattcccttaaccttttggataagccctcgaccgattagtattagtcagctccgtacattactgcacttccacctctaacctatctacctcgtcgtcttcaaggggtcttactcgctttcgcgatgggatatctcatcttgaggggggcttcacgcttagatgccttcagcgtttatcccgtccagacttggctaccctgccatggccttggtaggccaacaggtacaccagcggtctgtccatcccggtcctctcgtactaaggacagctcctctcagatatcctacgcccgcgccggatagggaccgaactgtctcacgacgttctgaacccagctcgcgtaccgctttaatgggcgaacagcccaacccttgggacctgctacagccccaggatgcgatgagccgacatcgaggtgccaaaccactccgtcgatgtgaactcttgggagtgataagcctgttatccccagggtagcttttatccgttgagcgatggcaatcccactttcataccaccggatcactaagtcctactttcgtacctgctccacccgtcggtgtcgcagtcaagctcccttatgcctttgcactctttggatggtttccaaccatcctgagggaacctttgagcgcctccgataccctttcggaggcgaccgccccagtcaaactccccgcctgacattgtcccccgcccgggtcacgggcgcaggttagaaacccaatatcgcaagggtggtatcccaacattggctccacacagactggcgtccatgtttcaaagcctcccacctatcctgtacatgcaataccgaatcccagtatcaaactggagtaaagctccatggggtctttccgtcctggcgcaggtaaccagcatcttcactggtatttcaatttcaccgggtgcattgttgagacagcgctcaaatcattacgcctttcgtgcgggtcggaacttacccgacaaggaatttcgctaccttaggaccgttatagttacggccgccgtttactggggcttaaattcaaagcttcgcttgcgctaacctctcctcttaaccttccagcaccgggcaggcgtcagcccatatacctcaccttacggttttgcatagacctgtgtttttgctaaacagttgcttgagcctattctctgcggccacatctctgtggcaccccttctcccgaagttacggggtcattttgccgagttccttaacaatgcttctcccgccggccttaggattctctcctcatctacctgtgtcggtttacggtacgggcatgtatcacacaatagcggcttttcttgacagccggaatcacacacttcgctactttagttcgctgcgcgtcacgtcttcggattgcacggcggatttgccaaccgtactcctacctcgcttgccccggtattcccattcccgggatgtgttgtccttctgtgtccccacagttctgatgatacatggtacaggaatttcaacctgttgtccatcgactacgcctctcagcctcgccttaggccccgacttacccagagcagatcagctttactctggaaaccttggatattcggcctggaggattcccacctccatctcgctactcattccggcattctctcttcttagcgctccacggctccttatcggtaccgcttctccgcactaagaatgctcctctaccaatgtacttacatacattcctaagcttcggtgttgtgtttcagccccggacattttcggcgcaggacctctcgactagtgagctattacgcactctttgaatgtgtggctgcttctgagccaacatcctagttgtctttgaaatcccacatccttttccacttaacacacactttgggaccttagctgtaggtctgggctctttcccttttgactacccaacttatctcgtgcagtctgactcccatacatcatttatgcggcattcggagtttgatatcccttggtaagctttgacgcccccttaggaattcagtgctctacctccgctaaactaatatgaggctagccctaaagctatttcgaggagaaccagctatctccgggttcgattggaatttctcccctatccacacctcattcccacccttttcaacggatgtggatccggtcctccacggaattttacttccgcttcaacctggacacggataggtcacccggtttcgggtctgcctgtactgacttgacgcccatttgagacttggtttcccttcggctccgagccttaagctcttaaccttgccagtaccggcaactcgccggaccgttctacaaaaagtacgcggtcgcaccttaacgtgcttccacagcttgtaaacacagggtttcaggttctttttcactcccctcccggggtccttttcacctttccttcacagtactatgcgctatcggtcactaaggagtatttagccttggagggtggtccctccgacttcccacaaggtttctcgtgtctcgtggtactctggatcctgctgcttcctattgttttcgtgtacggggctttcaccctctctggcctgacttcccagacagttccactaacaaatcggttcacgtttgcagtccttaaccccagcatgcacgcacgctggtttgggctcttcccatttcgctcgccgctactttgggaatcgatgtttctttctcttcctccggctacttagatgtttcagttcaccgggttccctctgcatggctatggattcaccatgcagtgactgaggtttgctcagccgggtttccccattcagatatctccggatcaaaggatatttgctcctccccgaagcttttcgcagcttatcacgtctttcatcggctcttagtgccaaggcatccaccctgcgctctttatagcttaaccaaatgatttcccgccgcgggttgctgcgggtcctctaaacgtccatagcgttggacgctttggttctaggttttcataaacgctttcgcatttacaagtttgttttttccatacaatctcttgtatggcctcggatgtcttgatattctgatttagaatatacaattcatttttattcaatatgcggttttcaaggtacgtttggtatgcttccgtttcctctgaggttttcagcacaagcttcttccctttggtcacttcagcaaatggagatggagagattcgaactcttgaccccctgcttgcaaggcaggtgctctcccaactgagctacacccccatagaaatctggcacccacctgctctcccatgccgtctccagcatagtaccatcggccgcttaggtcttaaccatcgtgttcgggatgggtacgggtgtttcccctaagcgcatcggcaccagaaatttcgtgttacaatagtaagtgcacaggctgattgggcagagtattgaaagcttgctttcataagctctgttcaattagactgtataagcgacgcagtcgcgaccgaaagggcggagcccttgaggtgcacttacggaccttacttcattgaacactagacagtatataaaacccttacttcttcttccttagaaaggaggtgatccagccgcaccttccgatacggctaccttgttacgacttcaccccagttacctgccccgccttcggcagctccctctcttgcgagttgggtcactgacttcgggcgttgctgactcccatggtgtgacgggcggtgtgtacaagacccgggaacgtattcaccgcgacattctgattcgcgattactagcgattccagcttcgtgtagtcgggttgcagactacagtccgaactgggacgttatttttgggatttgctccacatcactgtcttgcttccctttgtttacgccattgtagcacgtgtgtagcccaaatcataaggggcatgatgatttgacgtcatccccaccttcctccaggttatccctggcagtctccctagagtgcccagctctacctgctggctactaaggataagggttgcgctcgttgcgggacttaacccaacatctcacgacacgagctgacgacaaccatgcaccacctgtctctcttgccccgaagggaaggcgccgttacacgccggtcaagaggatgtcaagacttggtaaggttcttcgcgttgcttcgaattaaaccacatgctccaccgcttgtgcgggtccccgtcaattcctttgagtttcattcttgcgaacgtactccccaggtggaatgcttactgcgtttgcgacggcaccgaagggctttgccccccaacacctagcattcatcgtttacggcgtggactaccagggtatctaatcctgtttgctccccacgctttcgagcctcaacgtcagttatcgtccagtaagccgccttcgccactggtgttcctcctaatatctacgcatttcaccgctacactaggaattccacttacctctccgacactctagcaaaacagtttccaaagcagtcccagggttgagccctgggttttcacttcagacttgcttcgccgtctacgctccctttacacccagtaaatccggataacgcttgccccctacgtattaccgcggctgctggcacgtagttagccggggcttcttagtcaggtaccgtcattttcttccctgctgatagagctttacataccgaaatacttcttcactcacgcggcgtcgctgcatcaggctttcgcccattgtgcaatattccccactgctgcctcccgtaggagtttgggccgtgtctcagtcccaatgtggccggtcaccctctcaggtcggctactgatcgtcgctttggtgggccgttaccccgccaactggctaatcagacgcggatccatctcacaccaccggagtttttcacactgtaccatgcggtactgtgcgcttatgcggtattagcagtcatttctaactgttatcccccagtgtgaggcaggttatccacgcgttactcacccgtccgccactcagtcaattaaaaatccatccgaaaacttcattttaattgcttcgttcgacttgcatgtgttaggcacgccgccagcgttcatcctgagccaggatcaaactctcatgtttaaaagttgattccaggtttcagactacttagcttggctagttatctttaaccttcattacttggttttgttctgaattttctcaaatccaaaggtctaaaccagaccttttgtttttagaattttcagggttttacatactgtctaatcttcaattatcaaggttctttgttgtcggcttgttcagcagcaacttttatatcttatcacagtcgcttgtgtttgtcaacaacttttttcatttttttatttcttattctcttgcgcttttggtactcaccgcagcgcaagagatatcttaccagatgtttcgacaaatgtcaacaataatttacaactttttttacacacctcttttacacacttttttacacaatacagcccatgcattcgcacgggctgtatcaatcaacttcatggttttatcggcagcgatatagcacttacagactgtgcctgttacagatatataacagttatataacagttatatatctgaaggtatcccttctgccggaattccgtcaaccggaatttcatcggatgatgattcgctctcctcttcaaccacctccggcgcaacctggaactcggacaggtatgcttcctcaggaagcccggccagatacgcaggcaggttgatagcaatgccgtccatatgatgcggcagggaaacggtcacatcgaccatctcttcgcttccgcctttttcctgagtaatttccagagtcattttaaaggtctggccaatacaggtagccatgcctctctccttatcccggagttttgctacctgttcaccgtccacatacaccactaccttataaggtgtggtataggtctgaccattataatcaatggacttattatctatatacaccgtatgtccgcggccaatgaccatcataatacctgcgatgatgagcaggagtaggattgctcctattctgaatagaatggtacgtttcgctctcaattctccccctcctcactctgtgcaagctgcagcatctgaccagccttgcccttagctcttcgttttttcgtctcatacatgataagagcaacggtgataacaccataggagatgaatacacggaaatactcaccaatcatggaatcaccggtaatggttgcgcctgctttgggcgccacaatgaacatcaggtggaacaggatgactccaaggaatacgttgccaatggatgccctgtcaacagaggctccgcccacaagcagggctgcgatacagaacataccaatctgtgtatgggaactgtaggtggaaatattgcccatattctgcaggtagataaccatgccaagtccggcgaaaaccgttgacatgataatagcgataatacgggtcctctccaccttgatgcctgcgtcaccggctacatccatatcctggccaacggcacgcatgtcctggcccagctttgtcttgcggaaccatatgataaacaaacacagcagggcaatgataataagggtcagtaccggaatcttgacacctccgatatggatggccagaagattgtccagatactgcctcatatgaagaaggctgaccgtgttgcggacaccataacctcttggcagcttaatggaggaatggataatcggaataatggaacccatcatgtacagaaccaccagctgatacagaccattcataaagaagctgatgatatagctggtaaccatctccctgcctttggccatgttgagcatcttaccgcagaaaaggcccagcagaatggaaatcggtatggaaatgatcatggcaaggataatgccgggtattccccatatctgccagtcggccacaaagataaggccgatttcacctgccatagcgcccagagtcataccgaagttaagtcccatgccggccataatgggaatcagcaggctcaggatcaggaaggcattcctgcccaatctggtgacaatctcattgagcagataccccggagaaaaaccggatatcggaatgcagacggcgcagataatgataaacatcagcggcacagagttattccgaactagttcgagaatgctattactgccgttatttttctgttttttactcattttgatccctccgtctttctggtcagagcataaagaatcataccgttggaaacaacgatacggataacctcgctcatatccatatgaatcatggaattcattaccgttggggtcatggtaacaatgccctggaacaggaacgtacctatgattacattggtaatggatgccttattgactgaagcgcctccaatcaggattgcagacactgccggaagcgccatatagaagggcgccatgtaaagctggataaagccgaagccctgctcatacatcaggatgcccaccgcggcaagccaggtagacatgatgacggaaagcattctcgtcttatcaatattgatgccggatgccctggcaaaattgggattagatcccactgccgtcatggcagtaccggtcttggtgtgaaggaacgcccacataaggaaggcaagaaaggcaaagaacaggaggctgcctgtaggtatggaaatcttaccgatattaatctgcaggaaattggccaatgccttatcgtaaaaaccctccagtgagattgttgtacgaaggcctttgcctgacaatccccaaaccatggtgggactgctgtatggcagtaaaagccacatcatacacataaaggatacggatgaaaagcccacataagtggcaatcatcatctcgccgcctttaatcttgttgagcagccagccgtagccgccgccaaagatcagcgcaaacggagtagctatcagaatagccatgaaaaagctgacaggtccggtaaagccaaactgaatggacatggtcgcacccagaagaccggagataatgcctaacggaaggccgaaattaagcccgcagcccgaatgcaccatgggcaccattgccagtaccaggacggcattccagctgaaacggttaatcgtgttggttatctgtgtgggaagatccgctccgacgattggcgccagaatgaagagcgccaaaagaaatccggcaatgatcagcctcggcagaccgaagttgtcaatcaattccctgattttcgtcttcttcccaggatttattgtactatcttgtatttttcccatgctgtctccccccttatttaacctggctgaccatgagcataccgaattcttctgaagattcggtcgccggcaggattccagcaatcttaccgcccgaaacaatggcaatacggtcacacgtggtcctcagttcctccagctcagaggaaatcatgacaacggtaactccatgctccttgttgaactgcttaagagcatccagtaccaatgatttcgcgcccacatcaatacctctcgtaggctcggatacaaacaggaatttaggttcaagtgcaaaggcctttgccagacacactttctgctggtttccaccggaaagctcctttgccttttgcttggagctggtgcattttatctttagctcgtctatgtatttctgggtcacttcgtggattgccttttcatctctccaggtaatcattcctccaaggtatttcttgaggaatttatcatgaatctgcatggctgaaaatgcaatattccactcaagggtttcatcgagaaggagtcccacgtcccttctgtcctcagaaacaaaggccagagaggcgtccagacattttcttgggttgttaagaggaatgggcttgccgtcaaattccactttgccgcccgcctcgcacagccccatgattccgtttggaatgcccagctttccctgaccggccagtccgcctataccaagaatctcgccttccttgatatcaagatctacattgcgcactgtctcacctgacatatccacccagagattgcggatagacatgatattctttgcatccggattaatccggatatccgccctggccgtggtctggatatttcttcccaccatccactttgtaatatccgcaacatccgtttcctttgcaggcacgtcctttacaacgtagccgtcccgcatgataaccaccttgtcacagactgtcagaatctcatgaagccggtgtgtaatgaaaatcacggcaatgcctttggcagccatgccgcggatggaatccagcagtgcctctgcctctttttccgtcagaacagccgtcggctcatccagtatcagcagtttcagattatccttgctgagctctctcgcgatctcagtaaactgcttatgacccacgggcatatcgctgataaccattttggcgtcaatcttaacgcccatcttatcaatagcctgctcagaacgttcggccatctccttataatcaagggtatctaatctgtcaccgaaaatttccgagattatattctttttctttggttcacggttgagcagtatattatctgttgccgtgaatcccggtattaatgaaaattcctgatgcaccatgccgattccggcctccaatgcatcaaagggtgttgagaagctgaccttctcgccattaatcaggacgtctccgccatatccgccggtttccctaatcacatccattccaaaaaggagtttcatcaatgtacttttaccggcaccattttcaccgacaagacccagtacctcgccggcattcagtgtaaagttaatatcagtcaagacctgattgccaaaaaaatccttcttgatattgcgcatctccaataagggagtgttgttattcatcatattatgcccacctaacacaacaggggggagagaaacccctccccactgttctccgtacttatttttattagtaagtgtcttacttgatggtgaagtatttctctggaacctcaatcttagtagaacccatgaaatgtcctggatcgcccatgatataggtatcctgatataccaggaacacattgtctaacttaacgccggtttccacattggtgtaattggaaccattccactcagccttaggagagaatacctggtatgcctttgcaatatcatcaatgtcgtcaagctcactctcgccattgaggacgttcagtgcatgctgtgcaaggccggcagatgtggtatatccataggaatatgcccatgtaccgaagtggtcagctccgcctttttcaacgatagtggactcaacctttgcaagaatcttatcaaaatcaccagcttcagcagtcagatcgataccaagagcgcctggataacccatcagcggtgaaggaagatctgcttcgatgaagtagccgccgtattccataagctgctttaacagcggctctgtatgggcgtcatttgtacagaagtaagcggcgttctcgccgtacttctcaacccactccggaaccttctcaagtatgtacgcctgagcaccggcaacacctacgtcagaggttggatccggagctgtctcaagtacgaattccatgccgaattccttgcaggcttccttcataacagccacacggcggctcatggtctcataagccatgtgacgcgggaaggaaatatgtacaaacgtatcacagcccagttcatgagcggtacggatgatcaggtagccacgggcaacgaagtcgttgttgcagaccaggtcagctgcgctgccaatctcaggaagatcctcatgtccctcgccggcaatacagagaatgtcagggcgggtctctttgatcttacggaaagcctcggttgtgcctggaacagactggttcatgatgattgctttcatcttaggatcatcagaaaggttgacaatggtctggatggtggtctctaactcctccgtgaagttgtccggataaatagccagcttaaccatgtcctcgccgtacatagcctggaacgcctcagcgccacgcctgtcatcctcggactgggatacggaaccggttacgataccaatgtggaaatcgctggctccctctgtgtcagatgcctcagaatcctctttttcatcctcttttttggcatcatcctttgcctcttccttctgagcctcggtagcctgggtatcagctgccgctgcgctcgtacctgtgccagaagaactgccacagccagcaagccctgtcaccatggctgctgcaagcataacgcctattaacttttttctcatacttacctccaaaattttttttacaaggggacaacagttactttttaattgtagcatatgctcatattttgtcaatagttataaaatccattttggcggcggtccaaatttatgcacatttccaaattgtcaaaaagaactgtaaaatactgtattttaagccatttttataccccgctgtccactgtaaaccagaactccacccccccgtccacattttcaacaccgcaggatttgttgtgtgaatccatgattgccttgacaatggaaagtccgatgccgctgcctccgtattccctggtccttgccttatccactttgtagaacttggtccagagattatccagatcctcctcgggtatatgctgccctgtgttaaataccgtgatgcgtacctggtccccttccctgaatatgctgatagtaatttgccgctccccgtccaggtgattcatggcattgttcaggtagttggtgatgacctcctctatcttaaactcatccgcccacacccatacaggctccttctgttcaaatacaacccgggcctccttttgctgcagcagaatgccggctgatgccaggatgccgcggatcagggctgtgatatcaaaccgttccatcacaggcatgtcgttgccgaattccagggcggtcagggtcaggagctgcttcaccatcttattcatctttccggcttcgtccatgatgacctcacagtagtaattccggctgtcctcatcctccgccatgccctcagtcagcccctctgcatatccctgtatcagggcaatgggggtcttaagctcatgagacacattggcaataaactccttgcgggtttcatcaatttttatcttttcctcaatgtccttttgcagctcgttattggctgtcttaagctcaccgatggtatccttaagccgttccgacaatgtattcatgctgtggcccagaactccaatctcatcctccgaatcccctgtgtagcgcgcctcaaaatccagctccgacattcgggcggacagcgctgcaagggaacgaatgggcgacaccacctttttggttgcatagtacatgagggcgcttcccagcacaagggcagcaagtcccacataagccaggaactcattggatatgcttacgctgtcgtgaatgctggccaggggcatggacatgataaacatggttctgttatcgtcaaaaaaaccccagctctggaggtaatatccctgtgaccgtctgtcatatatcttctgcacctgatggtcgtcctgggatatcagggtctccgtcctggggtcgatgattcctaatatatagcggtggagagcatctgccaggaattttccgtcctttgccagcggaatcagctctccggtaatgctgtcctgaatcacgatggtcgtattatatttgtcgttcatgagccgcaagagacggctggcttctgtctgctccccgtcgtttgagtacaggctctgcaaatcttccgtgatattctcgcccaggaactccttgtccacagcaatggcattcaggttttcataggcattttccaaaagctgcagcttttgtttggtatagaagctctccagaaaaaagctgttcaccgcccacatgctgaccagcactgctgccatcagaccaatgaatatcatggtgaattttactcttatggaatgcttcatccttcgctcacctcaaatttatagcccatgccccatatggtcttgatatattcgcctttttcccccattttactgcgcagcttctttacatgggtgtctatggtacgggcatctccaaagtagtcataattccacacattattcagaatcttttccctggaaagggcgattccctgattttccacaaagtaggtgagaagctcaaactccttaaagctcagatcaatctcctgcccgtcaatggtgacctgatgggccgccttatcaatgcagattcctcccacattcacgctgtccgtagaggccacattggtcctcctaagaatggcctccacccgtgccaccagaatcttggggctgaagggctttgatatatactcgtccactcccagggaaaagccctggagctcgtcacgctcctcgcttctggctgtcagcatgataaccggtacctgggaatatttgcggatggtcctcagaacttcccagccgtccattttcggcatcattacatccagaagaaccagtgcaatgtccttttgcgcaaagaatacgtccactgcctcctcgccgtcgcctgcctctatgactgcaaaccctttattggtgagaaaatcctttaccagctttctcattctggcttcgtcgtccactactaatatcttaagtgtatccatgatactgcctccttacatataatctggccttttttcattcttttatagaaattattttaacaaaaatcaaggaatatttccatcatttcacacaagtttcacaactaaggggcagctgttcagacggcgggagaattctcgcagaaacagcaccgtcgaaacgtttcaccggagaataaaggaaaagctccgggatttctcccggagccgttcacctgtatcttaattatccagattattcttcctcgtcctcaccaaccagctcgtcgtattcctgggcatccagaagttcgtcaaatgcttcagccacgatttcgtactcatcgtcatcctcgatattgtccaggttaggggttccgtcctcagtctcgctatagcggtacagatatacctcgccttcctctgagtcagcgccctccataggcagaagggcaatgtattcgtgctctcccgcgttaaaaacggtcagcaccacgcactccacttctgtatcatcatccagagtaagggtcactgtcatctcctgctcttcttcattcagctctttctcatctgccatatcctgattcctctcttatttccttaaatttaggcttgtttcttttctcttacactctatcagactcaccctgaaaatgcaagaacatattctctaatattcgattccttcccttgctccgattcccctctcgtagggatggcgcctcataaccatctctgtgatatagtccgcctgctcctgcagggcctctgagggacagcgccctgtgaggatgacctccagggaagccggtttttctttaagggcctttatcagcccggactcgtccacaaaccccagattgcaggctccaatggcttcatccagcaccagcatgtcatatggttcctccccgcccgcccccagggccatgttccaggccgtcagtagacagtggtcataatacagtgcagctgccttccgctgggactgggtcatgttccaggaaaaaccgaagttctggtcgcagggcagcactgtaatgccgggtatatggaccaggccattgacctcccccgaatcatccgtcttaagcagcctggccaccagtacccggtatccccgtccggcagcccgcacagccgcacctatagctgccgtggtctttccctttccatctccgcaatagatctggaccagccccgtttcattcatccctctgcctcctctgcaaaccttgatattgcctgtttcttgcggtaccgctccttcacatggtaaatatggagcctctcctttgcccttgtcatagccacatagaacattctgcgttcttcctccacatccggatccagaaccgccttgtgatggggcgtgacgccttcattggcatccaggatatagaccacccggaattccagtcccttggcgctgtgcatggtcataaggctgacgccctggcgctgcgcatccctgtctgccgcctgtttcttaagctgttccttgtattcctccatatggataaaccagtgttcatacgtcttaaagccggctgcgctctcctgaagctggtccagtacctcaaagagttcctccggcttcatccttctggactgggcatattcccggatatactcatcgtactccactgccttccggatataattgacagctgcagccggagccatgttccttaacatcgccaaatcatattccagctgctcaatccggtccatcatccagttcttatcctggtaaaaggatttcaccgactcccagctgacctgctggccctccagggcatcccggctgacgtagcgcttgggacggttgatgatttgaagcacattggaacggctcagatctcctaatgcggcccggatataggagattacatttccggctatccagtgctcatacagatttggcaccgcatccctcatgtaaaaaggtatgttgtattccatgagcttggaaatcagcagccgcggccccacgttggtccggtagagcaccgccatgtcattgtaggagatacccatggaggcatagtcacgtatttccgtgacgattcccagagtttcgtccataggttcctgccatgcctttatgatgaccggatgtccgttccctcttgccgccttgatctcctttggaaaacgggtcctgttgtgtgagataacccgccccgcagcctccacaatctggcggctgcaccggtaattggtgtccaggagaatcttttttgcatcgggataatcccgctcaaagcccagcatcagctccggctttgccccgcggaaccgataaatggactggtcgtcatccccgacgatgaacaggttgtttccgggaagagccagcattttcacaatctcatactgaatccggtttatatcctggaactcatcaattaatatgtacctgtatttgtcctgccatgcagacagtatatcttttctttccttaaacagctcatagcacatcaccagcatgtcgtcaaaatccagcagccggttctgtctcagccgtgcttcatagccccggtacagctgtctgaacatatcctcagaacagttttttgcataataatggtccatgtccatgagttcgcccttcaccatgctgatttcactgagcacagaggatatgaactccccttcatcctcaacttccaaatcgcattttaccagcatttccttcatgtactgaatgcgctgttcttcccttacaatgtctgcggccttataccggtaagccagtttgagaatcagaaaaaagacagaatgaaaggtcccgaaggaaacccggctgcatcctgcctgtgcaatctgttcatagcgctccttcatttccctggccgctgccctggtaaatgtgattaccagaatatgggagggatccacgcctgctttttccgtaagataacggacccggttggtgatgactgtcgtcttgccggaaccgggtcctgccaaaaccagcataggaccttccctgtgccggattgccgttttttgtgcgtcgttaaatgccatttactagattcctatgcctcaagcatctgtatccctttgcggattctggccagggactcttctttgcccagaacttccatgatttccgtggctccggccggcgtcatctgcttacctgaaacagcggtgcggatgggccacatcacaaagccggtcttaaccccagtgtcctccacatattttgaaaggacaccgtaaagggcatcgttggtaaaatcatcctgtgcttccaaaagaggcagcacatccgttaaaaccttaagtgaagtctctgcgttggttttcatcttcttatgggtgtacatggccgtatcgtattccggaagggcctcaaagaaatccacatggtccgcaatgtcggggaacacttcaatccttgtcttgaccatggcagctatcttcctgagatccaaatccctgctgacagctgccttcagatatggctcagccatcccgtagaaggtatcaaaatccattgccttcatatattcgccgttcatccacttaagctttgtcatatcaaacacagcaggggatttgctcatgcggtggtaatcaaattcctttaccatctcctccagggagaatatttcccgattgtcctccggtgaccagcccaaaagagccacgtagttcaccacggcctgggagataaagccctgctccaaaaggtcctcaaaggaggaatgtccgcttctcttgctcagcttatgatggctctcatctgtaatcagcggacagtgtacatagaccggcacatcccacccgaaggcggcataaagcctgttgtacttgggtgatgaggacagatattcatttccccttaccacatgggtaattcccatcaggtggtcgtccaccacatttgcgaaattataggtggggtatccgtctgacttgatgaggaccatatcatccagctcggagttgtccaccgtgatatccccgtaaatctcgtcctggaacgtggtggttcccgtggcgggattgttctggcggatgacatagggcatacctgctgccaggttggcttccacctcttctttggataaatggagacagtgcttgtcatatgtcatgatttcctctccatttacagttgtcttaagggaagccagacgctccggtgtacagaagcagtaataagcctctcctttttccaccagcttttttgcgtattccaggtaaatgccggatgcctggcgctcactctggacataggggccgcatccgccgtccttgtcaggtccttcgtcatgaatcaggcccgtgtccttcagggtctggtatatgatctccactgccccttccacgaaacgttcctggtctgtatcttcaatacggagaaggaaatcccctccctcatgctttgctatgagataggcatacaatgccgtccttaaatttcccacatgcatcctgcctgtggggctgggtgcataccttgtccttactctgctcatgttaaagtctcctatattcttctcaatctgataactcaaaaaccattatataccgaaggttgaaaaaagacaatgcctgttttcacaggcactgtccctttcttcttacctatttgaatgttgcgttgtttacctcatcagagaacttgcttaagtcctgaggcatccaggcaatcttttccttgccgcttacatccaccttgactctctggcacttgatggtcagctcagtcatctcttctgatggctccatctcgccaatctttgtcatatactgctttacagcatcctgcatcagcttctgaagggcatcctcatcaccggccatgatagctgctgctgtgtcttcgtcgatgttgttctgcatatcggtcataacgtctaccatgatattctgcatatcggtcatggaatagctcttaaccttcagaagtacggtggtctcgtccttgctctggtctgtgatctcggtgctgtaatccagcttgtcaatcagtccctgaagggcattggacatttcctctacctcttcgtcagagaactcaatgcctgcagcctcaaattctgacttgaacatggaaaccaggtctgtctcagcggaatcatccatcagggcggtctttacatcttcctcagaagcaaatcccagcaaatccttcataggagtcgcattttccttaacagacagctcatacagtgctcccactacctggtctgccggttccagcttctgctggcatcctgtcagtgcaatgctgcacacagccataacggttgcggccaataccgcaaaatttctcttcatgtttctcataaacttatctcctctttaattctgccctctaccgggcaatttatttttcctctgtcctggcagcagtcttattctctgccaagtcgcttggtctcatggtcaggttgattctgcccatcttatcgacctcagttacctttacagtaacctcatcgccgatattcacaacatcctccaccttgccaacgcgcttatcagacagcttggaaatatgaatcataccatccttattgggggccagctctacaaatgcgccgaagttcatgatacgcaccactttgccgttaaatatcatgcccgcctcaatatctgtaacgattccggtaataatctggatggccttatcaatcatagcctcgtccgtgccgcatacatttacagcaccgtcgtccgtaatgtcaatcttaacaccggtctcctcaataatcttgttgataaccttgccctgctttcctaccacatcgccaatcttctgcggatcgatggtaatctgcttaatcttcggggcatatgggcttaaatgcttccttggctctgagatgacaggcctcattacattgtccagaatatacattctggcttctctggtcctggcaatagcttcctcgataataggccgtgtcagtccgtgaatcttaatatccatctggatggcagtaataccattcttggttccgcccaccttaaaatccatatcgccaaagaaatcttccaggccctggatgtctgtaagcaccagataatcatcatccgtatccccggtcacaagaccgcaggaaataccagctaccatttccttaataggcacaccggcagccatcagtgaaagggtggacgcgcagatgcttgcctgagaggtggaaccgttggattccatggtctcagatacggtacggattgcatatgggaattcctccgcgcttggcagaaccggaatcaatgccctctccgccagggcgccatggcctatctcgcggcggccgggtcctctgcttggctttgtctcgcctacagagaaggatgggaagttatagtgatgcatataacgcttgctggtctcattctcatccaggccgtctaatttctgagcctcggacagaggagccagggtgcaggcgttgagtatctgtgtctgtccgcgggtaaacatacctgaaccatgaactctcggaagcaggtcaacctctgcggccaggtggcggatttctgtgatggcgcggccgtcaggacgcttgtgatcctttaagatcatcttgcggaccgtcttcttctggtactggtaaacagcctcgcccaggacggcaagccattcctcgttgccggcaaatgcctcttccagctttgctgtgatctctgctatattcttctcgcgggtctgcttgtcatcggtaaacacagcctcttccatttcctgaggagtcacgatttccctgatggcggcaaacagctcttccggcactgcgcagctctcgtaagtgtgcttttccttaccgcactcagccacgatggtgtcgatgaacttgataatttcctggtttacttcatgagccctaaagatggcgtcaatcataatctgctccggcacctcattggctccggcctcaatcatgataaccttttccctggtggaagcaacggtcagtgccatgtcagatacctgcttctggtcagcagtggggttgataataaactcaccgtcaatcagacccacctgcgtggtggcacagggacctgcaaacggaatatcggaaatgctggttgcaatggcagaacccagcatggctgtcagctcagggctgcagttggggtccacacacattacgatgttgtcaagggtcacgtcgttgcggtaatccttagggaacagcggccgcatggggcggtcgataacgcggcaggtcaggacagcgttctcagaagccttgccttccctcttattaaaaccgcctggtatctttcctactgaatataatttttcctcatattccacactgagcgggaagaaatcaatgccttcccttggcttggatgacgcggttgccgtggaaagcaccaccgtatcgccatagtgcatgaatgcagcaccgcttgcctgggcagccacacggccaacctcaacagtcagcttgcgtcctgccaaatccatactaaaacttttaaacatactggtatctcctttacaataaaaaaataataaatgttaccggtatggttggggcatgtccgatttcattggcatcccccggggcagaagacgccgaaactactgatctgcctgcagaatccccaatcctgcaggtacatcagcggtctcggagtgatacctctgccgcccacaccgcttcttcctctccatgataagcaaatatagggtggagttccctccaccctaatcttcagaattactttctgataccaagcttctcgattaatgcacgatatccttccaggtctgtcttctttaagtaatcaagaagacctcttctctgtccaaccatcatcagaagacctcttctggagtgatgatcctttggattctgcttcagatgttcggtcagttctgtgattctctctgtcagaatggcaatctgaacctcaggtgaacctgtgtcccctggcttacggccatactctgcgataatctgtgctttcttttcctttgaaatcatggtgtttcctccttaatattattcatctcaccaaaaaccaggctgccggctggagtcaccaggtaaccgggcatcggcgttatttcataccgatttagtatagcataaatgggtggggttgtaaagtgcgaaaaaataaatttggcgggagtaaatttggcatgagggcgtctcccgtctcacccctgtgcaatcatctccggatggttttcataatatgcattggcaaactctttatccttctcaatccgctccttcagttcctcaaaggaggtgaatttttgttccgggcggtcgaaggccaggagctggacttctatatttttaccgtagatgtcgccttccaggccaaagatataggtctccacgcctgcagggtattctcctcctaccgtgggctttttgccgatattggtgacgcctttatagtagacgccgtccaccagcacccgtgatacgtaaacgccgtatctgggcaggcgcttgatgggaggcggaaggatattggctgtggggaagcccaacaggctgcctccgatgtggttgccgtgcactacttccccgtggatggcatagggctggcccagcagctggttggccttttccacattgcctttttccagctcctcacggatataggtgctgctgatgtcacgcctgtggtccttttccttttctatgacatggagatggtaacccaggtcacgggccatggcagagagcagctctgcgctgcccgctcccttgtagccaaagctgcagtccgggcctaccacgatttccctggcatgcatgcggcctgccagaatgtcctttacaaaggcttccggctccatatggcgtgtttcctcggtaaaggggtattccaccagataatcaatccccaccttctccatgttggcccggcgctccaggttggtggtgatgacggtctggggctttcccgtgactgctgttccgggagccgttccgaaggtgaagatggctgtgggatacccagtctctgccttcagctccatcatggttctcagtaacttctggtggcctctgtgcctgccgtcaaacttacccagagtcacgatggtgggctcctctatctgaaattctgtggtgtctgcaatatacctcatcctgtcacttcctcgttttttcctctgttccagatgttccggcagcgctgcgcgggcagctacataaggaacatcttccagggcttccaccagtgcctgtccttctggtactggtatacccctgtgaatctatgattactgtcatacatacggaacatctgtccgtcctcagccccggccttccactggtctgactgactccagtccagatgtcttgcaaagcagggatttccgttgtgtaaaagggaatctgcttccggcaggcatccaagaggcggataggactgcagggcttcctccaccgggaggatgcagctctccacagctgcctggtcacggagctgttccagctggtccagtgtaaggctgtcctcaatgctgaaacggtccaccctggtacgtgtgagatgctccatacagcccccgcatcccaaaagccttcctatatcatggcacagggtacgtatgtaggtgcctttggaacaggtgacctccatccagaccctgggcagttctatcctgcttacctttatgtccagaatctgcaccgcccttggccggcgttccacttcctttcccgcccttgccagctcatacagcttctttccgtccaccttaagcgcggagtacatgggaggtatctgggcataatcgcccttaaatcccataacagcttcatttacctgttcctcaacaagggacagcgccccttccctgtcttctgccagaatagttcccgtggtgtcctgggtatctgtctcacagcccagcagcatgacagcctggtacgttttggaccggtccgtcagcatatcgcacagcctggtgcctgcccccagacaaacaggaaggactccttcagctgcggggtccagggttcctgtatggcctatttttttctgctttaaaattcctcgaagccgggctaccacatcgtgggaagtatagcccggctctttgtatacatttatgattccgtgatacatggtatgttccttactcctggctgcctgatgcagcatccagctgcctggcaatgtgtacggacagattgttgattacgtcgtgtatgctgccgctcatagagcatccggcagcccttacatggcccccgccgccgaagaacgcggcaatcctgcttacgtccaccagatactgggagcgcatgctgaccttaaattcctgaggtcctgtctcatagaggaaaatggcaacttccacgccttccgtaaggcgcagctggtcaatgatgccgtccatatccttgccgtcaaccccgtaaaactccatctcgctctggcggatggcgctgaagatgcaccgtccgtcaaaaaaggtgatgctctccaaaagggctctgcccagaatctggttctggatgtatgtttttctgtaaaagctgttgtctatgatggctccgaagtcaattccctttcccatcagctttcccgctatctccatggtgtgggctgaggtacaggaaaatttgaacacgcctgtgtcgtggatgatgccggtgtacaggcattccgccgtataacggtcaagttttccttcgtccagctggtcaaaaaggacctcgcaggtggaactggcctcatccggaaccacgttggtgccgccgtaacgggtattggtcacgtgatggtccaggcacaggcttttgtccgcctggtccaggtaatgtttaaaatcacccagacgctggatatcgccgctgtccaggcagacgcagagctcatagcattcaccgtcaacctggtggcggattgtatcatatcccttcagataactgaatttaggggatgactcctccagatatacggctgcccgtatatccggataattaagccggagatagttataaagtcccagtgtggagcccaggcagtcgccgtccgggcgtatatggcccaggatggcgacggacttggtgccctctaacatctgttcaagaatcgtcattaaaactcctcctttgctccttcctcatcctgtgtttcttcctgatgaaggtcttttgtcacttcatcaatgagtctggacatgttgacaccatattcaatggactggtccaatatgaacttcagctccggcgtgttgcgcaggtttacccttctggcaagctccctgcgcacatacccttctgcgctctttaacccctggatggttgactttcccgcctcctcgtccccaagaacgctgatatacgccttgcagaacttaaggtctggtgtaacctccacggaaaccacgctggtcatgggatgaatcctcggatccttgattcccccgcggatgatttcactgagctcccgctggacctccatgttgattctggtattctttatgctgttcttacgcatgtaactcctctcttagccatgatgcctatctcggtacttccaccatgatgtaagcctcgatctcatcatcttcctgaagatcattaaacttctcaaatacaagaccgcactcgtatcctgccgccacttcctttacatcgtccttgaaacgcttaagagaagccagaggtccttcaaaaatctgctcgccctctctcttgacacggcagctgcagtttctctggaacttgccgtccaatacataggaacctgcaatggtgcctatgccggatgccttaaaggtctggcggatcactgcatggccgataaccttttcctcgaatacaggatccagcatgcccttcatggctgcttccacatcctcgatggcctgatagataaccttgtacagacggatatccaccttttcacgctccgcaatggacttggctgttgcgtccggacggatgttgaagccgatgatgattgcgttggacgcggatgccagggaaacgtcggattcgttgatggcgcctacgccgccgtgaatcaccttcaccataacctcctcgttggagagcttggtaagactctgctttacagcctccacggagccctgcacgtcagcctttacgataatcggcagttcctttacattaccggcctgaatctggctgaacaggtcatccagagacagttttgcctttgtatcctctatcagtttgctctttccttctgaaataaatgtctcagcaaagtttctggcttccttctcattttcagtagccacaaatacctcaccggcattcggtacatcgttgaggcccaggatttccaccggtgtggacggtcctgcctcctttacgcggcggcccctgtcgtccatcatggcacgaatcttgccgaagcatgcgccggccgcaatggtctctcccactcttaaggtacctttctgtaccagaaccgtggcaacaggtcccttgcccttatccagctctgcctcgattacaaggcccctgcccttacggttggggttagccttcagttcaaggacgtccgcggtcagaagaaccatctccagcagatccttgataccctcttttgtatgggcggaaacaggtacaaagatggtgctgccgccccaatcctcgggaatcagctcgtattcagccagctcctgctttaccttatccacgttggcgcttggcttatcaatcttgttgatggccacaatgatttccacattggctgcctttgcgtggttgatggcctcaaccgtctgaggcattacgccgtcgtccgcagccactaccaggatagcgatatccgtggactgcgctcctctcatacgcatggccgtaaatgcctcatggcccggcgtatccagaaacgtaatcttgcggtcgtttatctcaatgacagacgcaccaatatgctgggtgatgccgcctgcctctcttgcagtcacgttggtctcacggatggcgtccagaagggaggttttaccgtggtcaacatggcccataacacacacaaccggtgatctgggaaccatgtcctcggtgctctcttcatcttccttcagaagctccgctataacatcaacctttacttccttttcacacaggacatcgaattccatggcaatctcttccgcctgctcatagtcgatttcctggttcagggtcactacctggccctttaaaaacagcttctttacaatgacagacggctgaagcttcatcttctctgccagctccttgatggtgagtacatcgggaagggtgatggttttcacctcatccgccttggactcctccttcttaggctggggcatgataaatgctccctttcctgtcttcggcactttcttcttgccgtcctccaacctgtcgcgcttatcgaacctgtcattcttatgagaattcttgttctggcggttgctggttggctttgtctggattggggtgtcaaaggaggattttccgtctctggctcctgccgggcggcggctgtcattcctgcctctgttatcccttgcatccttgtcatctcccggacggccctgatagccgccctgaggcctgttgccctggtagccgcctccctggggcctgttgttgtcgcggttgccctggtagcctccctggcctccctgatagccgccctggggcctgttgccctgatagccgccaccctgaggtctgttgtcgcggttgccctggtaacctccctggccctgatagccgccctggggtctgttgccctggtagccgcctccctggggcctgttgttgtcgcggttgccctggtagcctccctggcctccctgatagccgccctgaggtctgttgccctgatagccgcctccctggggcctgttgttgtcgcggttgccctggtagcctccctggcctccctggtagccgccctgaggtctgttgccctgatagccgcctccctggggtctgttgttgtcgcgattcccctggtaacctccctgatagcctccctggcttctgttgttgtcacggttgccctggtagcctccctggcctccctgatagccgccctggccgcggttattatcgcggtttccctggtaacctccctggctcctgttattgtcgcggtttccctggtagcctccctggcctctgttattatcacggttgccctggtagcctccctggcctccctgatagccgccctggccgcggttattatcgcggtttccctggtagcctccctggctcctgttattgtcgcggtttccctggtagcctccctggctcctggctgtatcgcggctgtcctgggcagtttgctgggttcctgcatgagcacctgcctggggtgttgcagatggctggggtgctgcggctttctctgaaaccgtatctgcggactgggcctgcacctgaggtttggcagcctctgccggtactgccgatgcagccggtgctgctgcctgcgccggctgcggcgctgccgccggagcgggtgttgtatggccctggtttgccgcctggggtttcggaggaaccggacgcttaatctgctgctgggcgttctgcgggcggaacacggctgtcagcttcttcttagccggctctccctttgacgcgccgtcctggcttctggcagcctctgccttaggagcctctgttttaggcgcttccgtccttggtgcttctgttcttggagcttctgctctggaggcctctgttttaggagcctccgtcctgtgctccggtgcggcgagttttgcctccctcttaggatttgcaaaagagcgcacaatattctcctgatcctttgtcacattcgatgctgcatataatacagctgctttatctttcgtcttaataatttccaatatctccttactggtcttgcccagttcatttgccagttcacttactctcattcaagctacctccgtttatattcattcgttctaccattgactttgcgaaacctgcatcctccactgacagtgacgccctgaactcctgccccatggcatgccccagttcgtcctttgttccaaacagatagattgggactttatagtaagtacacatgttggtaaactttttcttcgtgttgtccgaagcctcttccgatacgattaccaaatgggactttccgctctttactgatttctccgtcgaaaattcgccgctgaccaccttcctggcccttgttgcaaggcccaccaggcttaacagccttttgttatctgccaagttcttccatctccttttccagagtttcatacacctctttgggaatggccatcttgaaggaacgttccagtccctttcccttcactgccttcttcaggcattccattgatggacacaggtaagcgcccctgccgttcttgcggcctgtggcatccaacataatctcatcctcggcggtttttatgactcttatcatttctttcttgctcttcatctcctggcagccaatgcactgcctgagcggaacttttttcatgctcacttacatcactcctaaccttctcagagtatcccttttactgttcgcttccgtcttcctgatagttttcttcatattcctggtagctttccggttcctcctgctcttcctcataattctcagaggacgtgtcgccgtactggagtcccatctgctcgaagagccccatttccctggcctgggtttcactcttaatatcaatcttaaagcccgtaagccttgcggccagtctcgcgttctggccctccttgccaatggcaagggacagctggtaatccggcacaataacctgtgcttcccgctcttcctcatccgccacaacgcagataacctttgcagggctcaaagcgttttcaatcaggtacgcaggattgtcgtcccagttaatgatgtcaattttttcaccctttaattcacttacaatggaattgaccctggaaccgttgagacccacgcatgcgcctaccgggtccacattggcgtcattggatttcaccgcaatctttgtcctggaacctgcttccctggcaatggccttgatttccactgtgccgtcgcggacctcggccacctcggattcaaagagacgtttcaccaggtccgggtgtgtcctggacacagagactcttgggccctttggcgtatcctttacctcgatgacatataccttgacccgctctgtaggacggaatatctcgccctttacctgctcgctttcattgaggatggcgtccaccctgcccaggttaatgctcacgttccttcccagatagcgctgtaccacgccggtcatgacatccttttccttcatataatactcgttgtacagtgccttgcgttcttcctcgcgtattttctgcagaatcacgttctttgcgttctgtgtggcaatacgtccgaatttcttggaatccagcggaatctgtaccgtatccccaatctcatacttgggattcagcatcttggcatccgccagactcatctccagacaatcgtcctccacgttttccacaaccgctttttctgcatatactgcaaagtcacaggtatttgggttcaccgtgacctttacattatcggcttttccgaaatggttcttacaggcagtgagtaaagagttttcaatcgcttcaatgagcgtatctttggagatgttcttctctttctccaatacctccattgcctctaacagttccttgttcatgtttatcctcctatccatgtctcagcatgtgaatgatctaactaaaaatccagcgcaagccgtatcagggcaatgtccgctttttcaaataccatctggcttccgtcttccatggtcagcgtcacagtattttcatcatatgcactgagggcgcccgtaaattccttttgcttgttaagctgacggtaaagccttacatccacatccttgcccatgcttcttacgaagtccttttccttcttaagaggacggcccagtcccggcgaacttacttccagaatatagctgtcgtcaataaaatcctctttgtccagccagtcgcttaaggccctgctgatgacctcacagtcatccacggcaatcccgccttctttatctatataagctctcaggtaccaggtacctgcttcttttacatattccacgtctaccagttcaaaaccatgctcttccatcagtggaaggaggtgtttctccacccggctctcatagctctccttttttcccatcgttccaccacctttcctgtctttccaaaacgaaagagtggactggtgtccactcttttatcagtaatttgcattagttatcgtatacactataccatcatgccgctgtaaatgcaagcattttcaaggattttatcgaaaatttcgtaacagttcaaagtcccgttacatcttcctgtccgtccggaatctggaaatcaaatcaaaaagtttcttagcttcctctgaaagctcgcctcctgttgcagcgttctcctccaccatagcggcatttgtctgaaccactcctgatatctgttcgatcccgatgcgcacctgatccagggattttgcctgctccgtggaagcctttgatatgtcctccactgcctccgcgatctgttgtgcgctggtaaccacctgtcccagtgactgtgccgtctcattggcaatcttctgtccgttatcaatggaccggagagactcttcgattagagatgtggtattcttagccgcctcgccgcttttatttgccagattccgcacctcatctgccacaacggcaaaacccttccctgcctcaccggcccgggccgcctccactgccgcgtttaaagccagtatattcgtctggaacgctatgtcttcgatggttttgatgatcttccctatctcgcccgacttattgctgatatccctaactgctttcaccagctcctgcatctgtgtgttgctgagcgcaacccggtggtccatttccacagagcgcccgctgacctcttcggtgcgtctggcgttggaatctacatgggtaaatatttcattgatggtggcggcaagctcttccacggagctggcctgcctggcatttccgtccgcaagactgctggcactgtccgctacctggcccgaactggccgtcacctgttccgctgtgcgaaggatgcttcccagggtatcattcagcgtagtccggatccgcatcagagcatccctgattttcgcaaaatctccttcgtactgaagttccagttcaaaccgaagattgccgtcagcgatttcatccagaaccctggtagtctcattgatatatttaatatagtccttaagctttgacacggtgcgctccatggcggaggcaacctgcccgatttcatcctttgagcgcacgcccgtctccacattcagttccccgtccgcaatccggtgtgcagcatcagcaagttttttcataggacgtgtaatgccgttggagatcagcagaacggccgccgccataaggaccatactgcctgcaaatgtgaccgcagacatgcgcatgaccgtataaaagccctgaagcgcttctgcctccggcatggcggagagtacataccaccccgcgctgtctatttcggtaagattcccgtagtaccgggttccgtctatctcatatatataatccccggtcaatccgttctgtacagcctgctttacttcatctgagatattgatttctgaaatggatttccccacctgttctgtgtccgggtagcagagaatatttcctgatccgctcatgagcacaagaaatcctgtctgccccaacttcacctcattgatccgctgctgaagggtatccagattaatatccgtgccggaagccccgtatacttctccgctgtgacggtcaatcacaggtgccgccgccgtcacaatagggagtcccgtattaacatctatgtacggctcggtcataacaggcttctttgtttttgtgcactcaaaccatggtcttgacgtaacgtcccaacccggatcactgataaagccgtccggctgaaaaagctggctggaatcggtatcagccagccagacccccagtatggtagatggatccagggcctgacgcaccgccatggcctccatcacctcatcatagcggggagctgcgctggcgcgttggctgcctctcagttcatgcatgaaatctatgaccagagcttcctgggcggactgctcaaccgcttttaaatgtccggtaaagaaagtatccacctcatgggccgcggactcagaatcagatgtcagcttttctctggcctgcaccttggcatatttccccacagacacgctgatcagcactcccgacagcagaaataccatcaatgcaggtaccatgatacctaaaaacattttaatccggattccaattttcataatatttaaccctccttatgtttccgacatctcctgttttggttatatatgcacaaaaatcacacattacagatgttccttgttattatatcgacaatataatgcaaatcataacacctgttacaccaaaaaatgccggaatcggagaggaatgtgaagtattattaaaaaatggtggttctatactgaatgttggggtgtgctgaaaagcacacttccaacattcttttcgttgtaataaaatacatctataagaagcctcctaaacgcattatcccgaccaaagtttaatgttacggaggtgaccccttatagatgtaccctaattataccaaggccttccttaacttggaaggtgtttttattaaaaaagtggttcaggcagactctttcattaaaattttcatccagtcccaaccggtagaacagacttgtccctgctgtggggctaaaacaaaacggattcatgattaccgtttacaagaagtccaggacattcccttactgggaaaacaagtaatcctgctccttcgcaaacgccgctacctctgcccatactgccgcaaacggttcacggaaccctattcgttcctccccagctaccaccgcaggacccgcagactggcattttacattgtctccctgctccggcagaccttttccttaaaacagatcgcagagcttaccggtgtttccgttcagacggtctgccgccttctggacacgatttgctatcctccgcctgaccagcttccacaagcgctttccattgacgaattcaaaggcaatgcttctaccggtaaatatcagtgcattctggttgatccgaaaaagcgccggatcctcgacattctcccggatcggacacagagccatctggctgattattggcggaacattcccaggaaagaacgcctgaaggtaaagttcttcgtctgcgatatgtggcgcccctacaccgaacttgcacagaccttctttccaaacgctacaatcatcgtggataaatatcatttcatccggcagatgacatgggcgattgaaaatgtacgcaaacggctgcagcggtccatgccggtttctctgcgtaagtattataaacgcagccggaaactcattctgacccgctataaaaagctgaaggatgagaacaaacaggcctgtgatttaatgcttcactatagcgaggatctgcgtctggcacaccgcatgaaagagtggttttatgatatctgccagatggaagcgtatcgtcagcagcagagagaatttgatgactggattgcgaatgcacagagctgtgggattaaggaatttgaggcctgtgctaagacctacagggcctggcgaaaagaaatcctgaatgcctttaaatacggattgacaaatggtcccacagaaggatttaacaacaagataaaggtgttaaaacggagcagctacggaatccggaatttcaaacggttccgaacccggatacttcactgtacatcataggataaaaaggtcggtaatgcggaggcttatttggcatgcccaaaatcagtaaaacctggaactaaacataaaaagggcccttttcatagaattggggagggattttaacaaatcacaccccaactattgacaaagagccaaaatggttagacccctcataacggaatctaaccataaatgtaagaaaaattagtgaaacgtcattgaatgccggactgtaacaaaaatccctttaaacagggcagtccggatgctttcatcaaagcattgcgcgtcctctgcaccaagtctggagcacgctgtaatcatcatccagaaccaccaaatccccgtcgcatccggctgcaatccttccctttctgtgatccacgcccagacatctggccgggttgatggtacatgaattaagggcagcgtcaaagggtaccagagcctgctccaccagaatcttaagtcccctgttcatgttgagggtgcttcccgcaatggtttctgttcccttgaggcgggccagtccgtcctctcctatctcaatgtcgtgaccgcccaactggtactgtcctcccggagggcagtgcttagccctgagggaatcgctgatcatgatggaataatcacgtcccttggctgtaaagaagttgttcagggccgccaggtgggaatggcatccgtcacagattatttccccgtagatatcccttaccctgaaagccgtgcctaccagccccggtttgcggtgatggtaaggcgtcatgccgttatatacatgggtcatggataaagcgccgttggcaattcccagaagagcctgctcgtaagtggctgccgaatgccccatgctgaccaccactccgtgggtggaacagtatctggtaagcgcatggtccggatcccgctccggtgccagagtgatatatttgataaggccttctgccgcctcctgatatttcttaaactgctccacagatgcagacgcaatggcttccggcggctgcgctcccttgtactccatgtccaggaacggtccctcaaaatggatacccaggatttcagccccttcgtagccttcctttaccacggctgccacattggccacggccctggtgagcacatccggcatctgggtcacggtggtgggcagaatggcggtgacgccctcctcaggaatccgcttcatccagttgcggagcccttccggctggccgtcgtttgtgtcaaaatcatatgctccgtgtgtgtggatatcaatgaagcccggcacgattctcttatccccgtaatcctcgtcagccggtcccgcaccatactcatggatacggctgatgaccccatcctcaatctccatctgggctgccatgaactgtcctgctatccagactctcttaccctgaatcctcataatttcttctccttccatattatatgtgttttctatattcattccccttagttataagtatatcacgttagaaatatttttcaatatattttctaaaataaaaaatatttttatttccatgtaacaggcgtttagatattctaaaggatacatgagctgtaaaaagcataaaaaggcagggtcctgtatcacataaaatatgattcacagcccctgccttatctcagttaattcctatatcacttcattcttagcatcatttacccttatttcccagactctggttatgaaccggcctcctgttcaggcgccttcgcccttttccctcacccttcccggctgccgtaaagcagtgccgctatctcaggaaagggttccacgctccgcctcaatattccctgtatatacgcaatggttataccgtagttggttatgggtatcccctggtcataggcgcatttcatcctgtatttcatctcacgctcattcagcatgcatccgccgcagtggacaatcagacggaagcctgccaggtcatccggaaactctgtgcccgaggtaaacacaaactccggttctgttccggtatattcccgtatccatccgggcagctttacggtcccgatatcctcgcactgccggtgatgggtgcagccctcacaaatcaggattctgtccccctttccgatgcggtccagagccctgaccccccgcaccatgggctccaggctccctttataacgggcaaagagaatggaaaaggaggtcaggagaatatcctccggcgtatctgcactgacctttgcaaatacctggctgtcggtgataaccattcttggcttcttacccagagaggccagcgtgtccctcagtccgttttccctgaccaccacggacactgcgtccgcttccaggatgtcacgtatggtctgctgctggggcagaatcagacgtcccttgggagccgccttgtcaatgggcaccaccagcacagccatgtcagacggggaaagcaggtctcccacaattttccggctgctttcctgggtcttgcccagttgtgccagacactccttaagcgccgtaataccctgaccggtatgggcgctgacagacaggatgggaatcgattcgggaatcccctccggcctcccaccggcagctccgtacaaatccgccttgttgcagactgccacacagggaatctgcttttctcctatcttcttcaggagggtgtaatcctcctgagccggcccgtgacaggcatccatcaccagcacagccacatccgtcttgttgagtacctgatagctctttctcaccctcaggcttcccagctggccttcgtcgtcaatgccaggcgtatcaatcatcatcacaggacccagaggcagcagctccatggccttatatacagggtccgtggtagttcccttcacgtccgacaccacagccaggtcctggcccgtgaccgcgttcagtacgctggatttgccggcatttctcctcccaaaaaatccaatatgtatccggtccgatgccggcgtattgttcattcccatggttatccgctcctctttccctggttccttgctggtttatttctgattcaataccatatcattttcggttcattacctgtttacttccggctcattgcctgttcacttccggttcatttccggtttattaccggttcaccgccggtcagccgccgggcggatcccctgcttaaaacctgaaatccctgataccctgttcaatctttgccaggttatctctgacaatctgctgcaccttctccttgggtatgcttccgatttccttctctatgagcgcctcaccgatgcgccttgtctcctcggagctgtaatccatcagatattccttcagcgtcataagggcattgggatggcagcagttttgaatctgtccgctcttgcacagggacataaaacggtcgcctgtgcgcccttccctgtagcaggccgtgcagaagctgggaatataccccattcccatgagccagttcaccacctggtccagggtgcggttgtcgctcacatcgaactgggctgaacattcctcctccggctcaggttcaaagtagccgcccacgcttgtcttggaaccgccgctgatttgggaaatacccaggtgcagcacccgttccctggttttctgactttctctggtggatacaatcatgcctgtgtagggaactgcgatacggatgcaggccaccagcttggcaaaggtgtcgtcgtcaattccattgtcaaaggaatccggatcaatgtcatccgccctgcgtatcctgggcacgctgatggtatggggtcccaccccgaacaccgcctccaggtgctccgcgtgcatcagaagtcccgcaaattcataccggtaaagctccaggccaaacagcacgccgcagcccacatcatcaataccgccctgctgggcgcggtccattgcctctgtgtggtaacagtaatcatgcttcggccctgtggggtgaagcttctcatagctttccttgtgatatgtctcctggaacagaatataggtaccgattcccgcgtccttaagcttcctgtaattctccactgtggtggccgctatgttcacgttgacgcggcgtatggctccgtttttatgctttatactgtaaatggtgtcaatggactccagcatgtattcaatgggattgtgcaccgggtcctcccctgtttccagggccaggcgcttatgtcccatatcctgcagcgccataacctccctgcggatttcatcctgtgtcagcttcttccttgggatatgcttgttcttggcatggtagggacagtacacacacccgttgatgcagtaattggacaggtacaaaggcgcaaacagcacgatgcggtttccgtagaaatcctttttaatctgctccgccagctcataaatctcctggttcttgtcctccagtccgcagtccagaagcaccatggcctccctgtgggtcaggcccctgcgctccctggcctttgccagaatctcgtcaatcagctccctgttggtgcggtttgcctccccgtaggcaagggtctcctcaatttccccgtgatggatgaattcctccgcatgggatgattttgggtcgtaattcatgttcttcctctccttttcttgccgggtcagggtccgtggccgtggcggcctccggtaacacttccccgtcagatgatttatatagttttatcaactaccgatattggagtacagggccttggagttaatgccctgaagcctgcccagtttgccggacagggcgcttatgatgtcctggggcgcatccaccacaacgcttatgatgttcacctttttctttgggtagggaagccccatcctcccaatgatgtactgactgtattggtgaagcagctcgttgacgctttccacagaatccttattttccacgattatgccgatcaccgcgattcttgtctccatacgatacctccgataatgaaaaaaaggatacgccaaaaaggcgtatcctgaacatactgtcacatctgtgtccccgccttccccttcagccctgcttcgggtcagtcaattacatatcctgctatgggatgctgccattgctgccgtctctttgctgtaaggcacttgccgcaagacaagcctgtcagcgcagataccggtaccgtgtatcgtggcgcacatccgtttttcttatcttactacaggtccggggggactgtcaatcattattctggaaagaatatccgcctgaaccttcaggagactacctggctcccctgatatacggcttgcccaatgcctccggcgcgctgtttttgccgatggcgcccaaaagggcaaccagggttataatgtagggcagcatggccagagcctgtgtgggcaggggcacaccgatggcctggagacggatctgaagggcattggcagcgccgaatatgaaggcagcgcccatcattccaaagggaacataccggcccagtatgactgcagccagggctatgtaccctctgcctgatgtcatattttcagaaaaattgcccacctgcaccagaaccagatatgctcctcccagtcctcccagcataccgtttaacagcacggccgcccactggtaccggtgtacagggataccggccgaatccgcggccctgggattttccccgatggcggcaaaggccattccctttgatgttctgctgtaaaacagggtgaccaggattaccagcacgtagaccccgtatgtcagcacatcctggttgaacagggcgtttcctatgaggggtatgtcccccagaaagggaatcttaagctttgcaaagggttctatctgctgataagactggccgcttgacatcagtttatagagaaaactggtgactccggccataaatatattgatggcgattccgctgacggactggtcctgggccagcctgatggacagcagcccgtgaatggcgctgaccatggccccgcccgccataccgcacaaaaggcccacggccaggctgccggagtaaaaggttcccgcaaaggagaagaaagctccgcccagcatgacgccctccatgcctatattaaggattcccgccttttcagatatggtttcccccagtccggcgtaaatcaggggcaccgccattcttacggaagccgtcagaaaggctgtcacgaaaccaacagtcaagatttgctctaacatggtttttccccctttctcttcctgttaaacagctccctgcccagaatcagcagcacaataaggcccaccaggatattgacaatggctgacggcactcccatctgtctctgcatggaattggcccccacctccagggcagcaaacccgatggcggcaaagagcacgcccagcggatgattggacgccagaagggcgataagcaccgctgtgtatccgcactccccggatattccctccagaagctttctctgcacacccataacctccacggctcctgcgattcccgccagaccgccgcttaaaaatgcggaaatgatgatgttcctgacaaccgagattccattacaggcagcagcccgcttgttgaatcccaccaccttgatttcatatcccaccgttgtcttttccaatataaaccagacaaggaacaccatgagcacggcaatgataaagcccgcgtgaagcctggtgggctttaagaaccggtaaagggtaacggaagggtccagcttgggcgactggggtatgcttcccgccgggtccatgagaaaggtcctgactgcaatacccaggaaattgatggcaatataattcagcataatggttacaatgatttccgatatccccagctttgccttaaacatggcggctatgagcgcccagagaccgccaaagacaaatcccattaaaatggcgcacaggatgcggagtcccccgggaaccccggtccaggtaagggccgcccatgcagaggcaagggctcctatgtaaaactgcccctcggctcctatgttgaaaaaaccggtcctgaacgccaccgcgcatcccaggcccgtaaaaatcaggggagttgcctttacaaacacttccataaacccgttcaggtttccaaatatgcctttaaagaacatggcataggcctctgccgggcttgcgtccgacagcatgataagaaccgtccacacagccgctgcaatgagtccgatacccgctatctcaactatctttgatttcctattcatctgccgcctccttagcaataccgcccatcagcaggccaattttatgtacatccgcctcatcccggttcagaatccctatgatacggccttcatacataaccgcaacccggtcgcttactcccaggatttcatccaggtcggctgatatcagcaggacgcatctgcccgcatccctctgcctgagaagggtttcatggacaaaccgggtggcaccgatatccagtccccttgtgggctggctggccacaatcaggccggcttcctcagatatctccctggaaagaataaccttctgctggtttccgccgctcatcagctttaccggtgttttgctgccgcttttgcccgaggtcttgatgctgtattcatccagggcctccctggctctcttctcagcctgtctgtagtccagcaccatgttccgcgaaaatggctgccggtcaaagtcccttaaaatcagattgtcttccactgtcatgtccatgacaaggctgtcgccgtggcggtcgtcggaaatataggagatgccggcccgaaaccgctctttcacactgtccctgcgtatatcctttccctggtattccatctgtccgctgtttatcctgcggattcctgttattacctcggccagttccttctgtccgttgccttccacacctgcgattcccaggatttctcccctgcggattgtaaggcttacgtggtccagggacatcttggtgctgtgctttttgtggaggcacacatccttaaggcttaaggcggtgtccccggcagcggattcccttatctccctccccgccttaagctcccgcccaatcatgcaggcggacagttcctccggcgttgtctcctctgtcaccaggctgctgacctttcggccatcccgcagcaccgtcacccggtcgctgatatccatgatttcccccagacggtgggtgatgataatgattccatacccctcatcccgcagccgtttcaaaaccccgaagaaattctccgtttcctggggggtgagcacgccggtaggctcgtccagaatcaacaggcttacatcccggtacagggcctttagaatctccactctctgctgctctcccacggaaagggtgtggacaggcgcttccgggttcactaaaaggccgtaggtcgcggcaaggcctgccagtttttcccttgccgacttccggtccgccacgattccctgccctttcagacccagcatcacattgtccagcaccgtcattttcttcaccagtgaaaaatgctggtgcaccatgccgattcccctggcaatcgcctcccccggcgacttaaattccacatgttcgcctttaaaacagatttcccctttgtccgcctggtaaatgccaaacaaaatgttcatgagcgtggtcttgccagctccattttcccctaacagcgcatgtatctccccctgctccacagacaggtccacatcctcgttggcatacacgcctgcaaaggatttggttatatgcttcatctcaagtaatggcatctgttccatcctttctttccaaacagggcccgcacccccggacacgctcagctgcgcttggtttgatgcaggcccttttcaggaaatatcttatgctctgggcttggtatcacatggtacttcaaactctccagattcaattgccgcaatcttatcggaaattttctgcttcagctcatcaggaacagcggaatccagattgtggtaaggagcaacgctcactgccccgtctgccattcccagctggtagatgccgccctcaaaagttccgtccgcaaccgtcttaaaggccacctcaatcacatggggaatatggtaaacagaggaggaaaggatggtgtctggcgccaggtcgttctggtcataggaatcgcctgtggcgtagacctttgcttcctttgccgcgttgatggctcctgttccggactcgttggcacagtgtccgattacatccgcgccgttatcaatcatggcctgggctgcctccttgccaagggccgtatcggtaaaagaaccggtccacgcggtctgtacctggatgtcagggtttacttcctttgccccgtcctcaaatccgttcatgattttaacaagggatgcgccctgaatcggtccgataaagcctacctttccgctctcagacatgccggctgccagcattcccatgatgtatccgccttcctcgcacttagacacataggaggccacattgtcggcagaaacctcgccttcggtcacaatgaactttgtatccggatattgctccgcaacgtccactgccggatccccgaactcatatccatggccgatgaccacgtcatatccgctggccgcgtaatccgcaaaggctgcctcaatatcatccggtgtcagattctccgtataggtcacctcacagccgtaatccgcctccagaagcttaagcccgtcataggctgactggcaccagcccatatcattggctgcgccggacaggcacagggccaccttgtatgtcttgccgtccgctgtctgtccctcttttgcctggccgtcatcggcctggtcccctttttcctgggtatctccggtctgggcggaccctgcctgcttatctgccgcctctgtctttgcctctgtctcctttgcctgtccgctgcatccggtcaggccaaagcctgccatggataatgccagggctgctgccgctaaacgcattctgtttttcatgattcttacccttcctttttccttagatttttcatgtttcctcatatgtactgcatcatcagttatatgtatctataacacccggatctgcatggcggtgataaagttttcgttatcactctccacgaactgatccagaatattaaaattgatggcctgagcccccagctcaaggtccggcctggcctctcgcaggcgccggatggtatccggcacgccctcgtatcctcccagatggtatccgcagagaaaatcgccttccgggataatctggattctggactggggtatggtctttggcagctcctcatcatccggatacaggtaggcgccaaagtatttccggtccccctcataaaaggctatggtgggataaaagtaaaaggaattctccctgtacagcagctcctcgtcgccaatggaaataaacttccggtcctcaaaatgcttcaccgcaatctcatccaggcagattccatccatctcctgttccatgaaccggattttcctctggatggcctcatctatgttgagcagctcctgccactgcctgcgaagctcctgggagcgctgcttcatgatatccacagccctgttggagtttaagctggttctggattccttaatttcctccagggaatagcccagacggcgcatataggacaccgtggccagctcgtatatctggtcaaactcatactttctgcgcccgtttttctcattgcgctccctgggagaaaagatgccgacgctgtcatagtagtacagtgtctgtatgttaagcccgaacagctccgccaattccccgatagaaaaatattccttcacctgccagcctcctttcctttttccgccaaattccccgctaaataaaatccctgtaggcactgtgaggttcccggatgacccttgtgcatacagcctctccatccatggccagctttctctcatccacacctttcagaatgccgtctttgtaaacaatgtttccgttaatcatggtcatccacaccggtccggtaagtcccactcttgccagcagattcttcgggtcgtgaagggccccggccagctccagcgtctcggtgtcaatcataaacaggtccgctgcttttcccgcttccagggttcccaggtcagttcttccaagggtctttgccccgtttaccgtggccacctttagcatatcataggcggaggtgcatccccctctctccttggtgtggtatgcctgcatcagataagccatgcgcagggcatccagcagattggagctgtcattggtggcggaaccgtcgcaccccaggctcaccagaatgcctgcttcctgcatttcctttatattgagaatcgggaagccgcccagcacagccggtgccggacagtgggaaacccctgttcctgtggctgccaggaccttatattcttcctttgtcacttcccagtcatgggcataccatacatcctcaccgataaagtccatctcctcacaccaatccatggtgcgcttgccccagcgggcgatcatgccttcgttctctccctcgcccagatgggtgtgcatcctgactcccttttccctggccatggccacggtctcggcaaaggtgtccctgcggcagttaatgggctggcagggcgccattacgatctgcttcatggaaaaaggcctgggatcgtgatacagtccgatcagccggtcgcagtcctttaagaactcatccgttgtctccagcatattgtcgggaatggagcttccctcacttcttggaagggtgttggtcccccttccggcatggtaccggatgcccaaaagctctgctgcctccatctggcggtccaccggcgacttgccggtcttcctggtgtagcagtattggtggtcaaaggcgcaggtacagccgtgtttaatcaaatccgcaaaggatgtaagggtggagtagtaaatcacatcggaatcaatattctggaatatgcggtaaattttatcaatccagtccatcaccatcatgttgggatagtcaatggttatgagattgcgcacaaaggtctggaaaaaatgatggtgggtgttaatcaggccgggatacacgaactttccctctgcctgtattacctggacctcctcctgcttccattctcttcctgacaccgggtccctttggttcatcaggtccctgccgattgccagtatccttggaccctcaatgagcatgtccgcgtccctgtaaacccggtcttccccgtcgcaggacacgattgccctggcattcttaataagaatctttttgtccattccttacctctctttcggaaatatcatgctgcaaaaaggaccggctttgccagccggtcctttccgcttggctcttgaacctattatatatcctatagttactataggttcaagagcaattttgtctttattataaattgctatattcatattagtaaggcttataaatatacagacctatcacagcccgctttcaatcttctgcctcttgattccatgtttctcggcaaagcctgtaagaatcatggtcagggcaccgtcaccggtcacgttgcaggcggttccgaagctgtcctgaagagcaaagatggtaagcatcagcgctgtccctgtttcgtcaaatcccagtacgcctgtaatcagacccagggaagccataaccgtgcctccgggaacaccgggcgctccgatggcaaacacgcctaaaagtgcgcagaacaaaatcatggtacccagggacggtatggttccgtagagaatcttggaaatggtcattacaaagaatacctctgtcagaacagaaccgcacagatggatgttggcaaacagcggaatgccgaaatccaccatatcatccctcagtggcggctgtgatttcttggcgcagcgcagggcaacagccagtgtggccgcggacgacatggtgcctaccgcggtaatataggcaggtccgtaattctttatgacatcaaacggattcttgcctgaatagacgccgccgatggcatacagcagggccagccagatgtaatggccaatcatgacaatgatgactacctgaaggaacacaggaagctgttttgtaatagtcccctcataggaaagggcgcagaatgtaaatgcgataaacacaggaaggatgggaattaccaccttggtaacaatggacagcacaatctgctggaactcctccagcacctgagtaaccaccgcggccctggtccatgtggcggccaggcccagaagcagcgagaaaaccagggcgctcatcacaggcataatttgaggtatatctaactggaacacgattgccggcaaatcctttaagccttccacctcagtggcaatggacaggtggggaatcataaggaaacctgccgtcatagaaaaaagggctgctccgatcgatgaaacataggcaatgataattgcaactcccagcattttggatgcattgttgcccagccttgtgatggagggggcaatgaatccgataatgataagaggcacacagaaaacaatgacctgattcaggatgtatttgattgtcacaacaacatgcataaggccgcttccggccagctggccgactatgatgcccaggataacgcccagaagcaaccgaaacggtaaactgcctgttatttttttcatacttattctccaatcatgatttttatgatttcctcattggtctccttcatcccttcttttccaaggcgaccaacgttcttaagtgtggcctcgacacccttggtgacgatgccgtctcccccgtaaaactgctgaccgcgtatatacatgttgtagcccagaattcccgcgtccactgccgaggcaatcttggctgcacaggaagcctttgccccgtcgcagacaatgcccgacacaatggcaagggcgtttacaaccgtatgtacgacttctttaaaaccgccgccgcacaggtaagcaatccctgctccggcgcctgccccggcgctgacagctccgcagtaagcggaaagcctgccgatgggcgttttctgatggatggctgtcaggttggacagagccagggccctgtacttcttatcctcatccaccttaaattcctccgcatataccagcacgggaacagaggcagtgataccctggttgccgcttcccgaattgatgatgaccggcagttcacagccattcatcctggcgtcagaacctgctgctgccatggccttggccctggtgcggacgtcatttccagacatttccagaagaacagagccgatattggcgccgtaatccccttttaatccctcctgggcaatggcccagttgtacttaatctgacggtccagcacttcccggatatcctcaatgtccactgtattgataaaatcccagatatcctccatgttgagcaggcttctgtcggtcagaccttcctcctcctcgccggccacctctacctgcttaagaatctccccattcttttcgatcagcacgatattggtatgataattggcgatgcggaccttggcgtaggaatcccccttatacagagttacgataatatcaaaggtaatgccgttatccacatgctccaccctgatttccgtgttatccaggaattccttcatctgtctggtttcatctggcgtaacttctgcaatcacctccagttctttgtccgaatcacccgcaacgattcctgctgctgctgctgccggaatccccttcagatgattcgtgttaggcacgatgactgacttcacattcttgatgatgcttccgctggctcccaccacaacacggtccggcagctctcccagcactttcctggccgtggccgccgcataggcaagggcaatgggctccgtacatcccatggccggaagcagctcctccttcagaatttgaacataagctccgtacttaacatttgttttctccatgatgattgtgattcctttctcattttaattgattatccggaaaattactatacattttgtattgatttctgattagtattaatgtaccataaaaccatatggttgtaaaatttaatgtttttatgatatcgtttaaaaatttttatacaaaatgagcaaaggaagcacataatatggagctacgggagattgccgcctttatccaggtggcgcagttaaagagcttttccaaggcagccaagcagctgggttattcccaggcagccgtcaccatccaaatcaagcagctggagcaggagctgaacgtccatctcttcgaccgcatcggcaaacagaccaccctgacccaccagggagccctgttctatgaacacgctgtctccgtcatgaaggagctggaacatgccagggatgcggtcacccatgtatcggagctaaccggaagcctgtgcctggggaccattgaatccatttgcgccaccatattcccggagcttttaagggaataccaccggctctaccccaaggtcaacgtaaggctcatcaccgactcccccgagacgctgctggagatgatgaacagcaatgccattgatatagtgtatttcctggataagcgtatgtatgacagcaaatggataaaagtcctggaagagccggaggacatcgtgttcgtcaccgcctccggccatccctttgtgggcagggacagcctggacctggacctggtcatagaccagccctttatcctcaccgagcgaaacgccagctaccgttttatcctggaccagtatctggcggcccagggcaaggagatacacccctttctggagattggcaacacggaattcatcatcagcctgctgagaaagaacctgggggtttcctttcttccggaattcaccatacaccaggatattatcaacggggagctggccgtcctggatgtcagggatttttacatgagaacctggcgtcagattgtttaccacaaggataaatgggtcaccagggagatggacgcttttctgcgtctggcaacgtagcggccgcggtccctcgccgcgatccctcatgtcccggccgcggtccctcatgaccagccccataaccaaaccgtcatgaaaaattcatgctcaaagagcagcaaatcatgctcaaaaagcagcaaaaaagcagcccggcgcgtcagaatttttattctgaagggagcatatcctccctgccgcacatgggctgcttttgtctttttttattgtccgttaatgtaattcaccaggccgcctgccgatatgattttctgcatgaagggcgggaaggactggcccttatacgtctctccctttgtcttgttggtgatgattccgctgtcaaaatcgacctccacctcatcccctgcctctatggatctggccgccgacccacactcaatgatgggaaggccgatgttaatggaattccggtagaagatacgggcaaatgtctccgcgataacgcagctcactcccgcgcacttgatggccagaggcgcatgttccctggaagaaccgcagccaaaattcttgttggccacaataatgtcccccttctggacctgatttacaaattccttgtcaatatcctccatacaatgtttagccagctcgtcgccctgggtggcgtttaaatatctggccgggatgatgacatccgtatccacattgtcgccgtatttaaaaacgtgtccgcatgctttcatgttcagtctccttttcctttcacaatgatattgcctttgttccgttaatccagctggcaggggcagatgattttacccgctacggcacttgcggcagccacggccgggctggccagatatacctctgaatccacgtgtcccatacgtcccacaaagttacggtttgttgtggagatacatctctccccggccgcaaggatacccatgtagccgcccagacacggaccgcaggtaggtgtgctcaccacggctccggcctcaatgaaaatctccagaagcccttccttcatggcctgaaggtagatggactgggtggccggaatcacgatgcagcgcacaccctttgcaatctttctgccctttaatacctccgccgcgattctcatatcctcaatacggccgttggtacaggaaccgataaccgcctggtccacctttacctctcctacctggtcaatggtcctggtattggagggaagatgggggaaggataccgtgggctttaattcggacaaatcaatcacatatgtctcatcatactccgcgtcctcatccgcctcgtacacggtaaattcacgtttggaatgctccttcatatactccacggccagctcatccacagggaagattccgttctttccgccggcctcgattgccatgttgcagatggtaaagcggtcgtccatggaaagattcctgattccctctcccacaaactccatggatttatacagggctccgtccacaccaatcatacctataatatgtaagattacatccttgccgctgacccacttcgcgggcttgcccaccagctggaatttaatggcggagggcaccttgaaccaggccttgccggtcaccatgccggctgccatatccgtgctccccacgcctgtggaaaacgctcccagggctccgtatgtacatgtgtgggaatccgcgccaatgaccgcgtctccggccaccaccagtcccttttcaggaagaagggcatgctcaattcccatgtctcccacatcgaaataattggttatctcatggcggcaggcaaactccctgcagcacttacagttctcagccgactttatatccttgttcgggataaaatggtccataaccagggcaatcttatccttatcaaatacggtctttctgtccatcttcttcatctcgttaatggcaaccggagaagtgatgtcgtttcccagcactaaatccaaatccgcctctataagctgtcccgccttcacttcctcaagtcctgcgtgggcagccaggattttctggctcatggtcattcccataacttatttcctccttcaatatccttctctattaattctttgaaattatttcatccatgctttacattttaacatatgtattgttataataaaaatacataatatgaatgggatatatgaaaaaatgttatatagcaggaggggattccatggaacagaacctgtcccaatacaagatattttatgaagtggccaaagccggcaacatttccaaggcagcaaaggaactttacatcagccagccagccatcagcaaggccatcagcaagctggaggacagccttggcctgtccctgtttacccgaagctcccgcggagtgcagctcacctctgagggtgaaatattatttgaacataccagggaggcatttgacgccctggaccggggcgagcaggaactgaagcggattcaggaattcgacatcggccacttgcggatcggtgtgagcaacacactgtgcaaatatattctgcttccctatcttaagaccttcattgaccagtatccccacatgaaggtcaccatagagagccaggccacggcccagaccctggcccggctggaacagcagaagatcgacctgggcctggttgccgagccttcggtgcgccgtgacctggcctttatcccggtcatggatatccaggacacctttgtcaccacccccaattatctggagaacctgtacctgagggaagggcaggacaccagcctgtttgagaccggaaatatcatgcttcttgacaccagcaacatgacccgccaccatgtggacgaatacatggcggaaaacaacatctttccccatcagattctggaagtgaccaccatggacctgctgattgagtttgccaagattggcctgggtattgcctgcgtcatcaaggagttggtgcagaaggagctggacagcggcatgctggtggagattcctctggatatccccatccaccgcaggaccatcggcttcgcctatcacccggccaaccaggccatggccctaaaaacatttctggagtttttgtactgatattcaggacgtacatattcccgtacgtatcctgcccattattctgcatatataaaacaggcggattccccggatttttccgggggcatccgcctgttctttattcttacctgtatccgccaagatccgcggacacagtctatgtagcattagttattgattagttgttgatcagtttgtccgtatcattccagctgtaaagctttctcagctcagctcccaccttctcaagaggctgctctgcctcgttcttcctcatggcattgaaatgcgggcagccaacctggttctcaagaagccactcttttgcaaaggagccgtcctggatatcggacagaatcttcttcatggccttctttgtctcgttggttacaatctttggtccggtgatataatcgccgtactcagctgtattggaaatggaataacgcatacctgcaaaaccgctctcataaatcagatccacaatcagcttcatctcatgcacacactcaaagtatgcattctcaggagcatagcctgcttccaccagtgtctcaaatccggccttcatcagggcgcacacgccgccgcagagcactgcctgctcaccaaacaggtcggtctcggtctctactctgaaggtagtctccaggatacctgcccttgcgccgccgattccctgtccataagccagcgccatatccatggccttgcctgtggcatcctggtaaacagcaaccagacatggggttcctctgcccctctgatattcgcttctcacggtatgtcccggtgccttgggagcgatcatggtaacgtccacatccttaggcggaacaatctgtccgaagtggatagcgaagccatgggcaaacatcagcatcattccagggcgcaggtttggcgcgatggactccttatacatggctgcctgcttctcatcgttgatcagaatcatgatgacatctgcttttttggatgcctcagctgctgtatatacctcgaatccttgctcctgtgctttcttccaggaacggctgccctcatacaatcctacgattacattgcatcctgactcctttaagtttaaagcatgtgcatgtccctggctgccgtaaccgatcacagcaatggtcttgccctccagtaatgacaaattacaatcttcctgataataaatctttggcattgcttttttcctccttcaattcctttgaacttaaatcttaaataatatatgtttaaggcaacaaaaccgacgactctctgtccgcctttggccgcccccttaagcctctgttttacggaagcatcctgatatcctctgcgccccgctccaggccagtaaggccggttctggccagctccaggatttcataatcctccagcaggttaataagcgcatccagcttggactggtctcctgtcagcataacggtcagtgaatcctttcccacatccacgatggtggcgcggaagatactggatatggcgctgacagactggcggtcgctggcattggcacgcaccttcaccatcatcagttccctgtatacggaacggtccggctgcagctccttgatatcccttacatcctccagtttattgagctggttctttatctgttccaggacggtctggtctcccagggaaaccacggtcatcctggagtaccgcgggtcagcggtgacacctacagtcagactctcaatattgtatccgcggcggctgaacagccctgctacacgggccagcacacctgcagtattgtccacaagcagcgataacacgattctgtcgtccatctaatcccaccctctcatttgatggcaagcgccaaagcagctgccttcttaatagtaatttcaatcatagcaaccattgttctatttgtcaattgcataataggaatggttattatgagctcaagttatagtgacagaagcaaatcccttaaatccttcaccgtctctgcaatccaggcaggcctgcacgcatccatctcctggcggtccccatatccgtagagtacgcccacgcattccatgccgcactccctggcccccaggacatcgtgctccctgtctcccaccattacacagcgtccgattgtctcatcgtccgactccaggccgcactgttccagcacataccggattacatccgccttgcgcacccgggtttcccccatatcggcaccgccgatgaaatcaaaatactctgccatgtcaaagtgatccagtatcttcttggcaaactcctccggtttggaggttgccactaacagcactcttcctgcttccttcagggcttccagcatttcctttatgccgggatactccttgttctggacccagccccgaacgctgaaatactcccggtatgcctgcaccccctcccatgcctgctcatcggaaaagccgtaatacctcttgaagctgtccctcagaggcggcccgatgaaaggtgtcaggctatccagatcatctgtctgtacgccgaaatgctccagtgcatgctgcaccgatttggtgattccctccttagggtctgtcagagttccatccaggtcaaataaaatataatccttacggttcatagtcacttctccttttatatgcagctgtctgctatatctttccatccttaaacgccttcatcatctcatgtcccacgctgatataaggtccgtattccacgatttcatcccgtgtaaaccagccggcctcgcacagctcctcttcctccagacatatggtgtcatccccgtccagctctgccgtaaatcccaccatctccgtatcggaaaatgcccagggctggcttttatagtagcggatattcttcaccctgaggcccacttcctccatgacctccctgcgcacgcagtcctcaaaggtctctccgatttccacaaatccggcaatcagcgcatagtttcggtaagcgcctctggcatagcgggacatgagcagcttgtccccattggtaatggccacgatgacagccggactgattttagggtactccgtctgtccgcaggaaggacagaccagggcgcgctccttcaggctgggttctgtcttcgctccgcagccgccgcagaaccgtctgctctgcatccaccggtagagctggctgcccgttatccccgcaaatgcctggtgcagaggttcaaaattccggaacacagtcagaggctccatatagaatcctccgaattccggcactttcatatccgtcacacagtaataggccctgtcatcaatggaaaacagatactcggcctgtgccgaaaaatctccttccgcctccagttccccaaaggtgggaatcacactcccccttccgcttttgagaagcattaccttattatattcgtagtggagcaggtaatccctgtcttccggcttcttcctcctgaatacagggtcatatgtatgcggcgcaatatcctgaatcatgcatttagcctccgtcctttacggtctgttaatcctaaacgtccagcctgtaaaaatatatttagtgtctattgtatcacaggaacggttcattgtaaaaccttcctttcaaatcggcaatacagcagcaatgcagtacaagccggcaggcaagcccattgaaaaaggacgcccttaaatccggaacgtccttttcacctctcagtcatgaatcacaacattcaattttttatgaatccccaggctgagaattcccagtatggactttccgtccaccatgcagctgccgcagcacacgtcgatatcttccggctgcttctcgctctgctggacaaaccgctttacatcctccaccgaatcaaacataacttccttagtggtcatatgggcacctcctgtcattttatacagaaagtcttcccatctcagaatggcttatacacgccgaagcgttttttaagcggcttaagcttccagcgtctgagactgctgaaaaagtaataataaatcacaaaggcaaccgtggtcaggctccaggtcaaaggatagcagaaggcagcgccgatgatggtgtggtaatgaggcagaacaaacataatccacagcacccggaccgcgcacacgccgatgcccgtaatgataaggggcatccatgcgtcccccacccccctcagggtaccggatagtatctcaatggcaatataggtaataaaggtaggaaccatgaaatgcagcaaatccatactgatggcctggacctgctggtccgtggtaaacagctccaccagcagatggccgccgttataaaggaccactcccacggacgctgtcagcaccacaccgatcaccatgcaggcaccggctcccttgcgcacgcggtccaggcggccggccccgaagttctgtcccacaaaggtagtggcagatatgccaagggcattgatcatcatccagtacaggccgtccaccttgccgtaggtggcccatgcagtcacattgtcggttcccagggtattgacgccggcctggatgatgacattggatatattatacatgacggactgcattcccgcggggataccgatacgcacaatcctctggagcatcctctggtcaatgcgcaccttcttccattccagcttatacatatcatcggttttcataagggccaggaccaccaggactgcgcttaaaagctgggaggtgatggtagccagggcagcgcccgccactcccatccccagcactgccaccagcagcacatccagaatgatgttggtaaaacagctggcaatgaggaaatacaggggccgcctggaatctccgacagcacgcaggattccggcgcccatgttgtagaccaggttgactatgattcccaggaaatagatccggatatacaccaccgcatggcccatgacatcctccggcgtcttcatggcttccagggcccagggcgatcccaccagtcccacaatcataaagataatgcccccaataacggaaaaagcaatggatgtatgtacggcccagtggaccttatccgccttcctggcaccgtaaaactgagatatgaccaccgtggcaccgctggacaatcccacaaagaaacccaccagcaggttaatcagggtgctggtgcttcctcctactgcggccagggcctgctttcccacaaagcggcccaccaccatggcatccgccgtattataaagctgctggaaaaatgtcccgaacaatatgggaaagaaaaacagcagcagctgtccgaaaatgcttccttccgtaatacggtttccctttacaacctttccctccatacctgcacctcatgtctgtacattttcgtaaaaaatcataaagaataaaacagcacccaccagttaggtcagctgatgggtactaccttcaattcctatcttatatcatggaccggcttttgtccactggattttattctgcggccttttattccgcagcctcatcttttgaggctacctctgctatggactttaccaggcctgcaattccctggatatccgaaggaatgataatcttattggcctttccgttggcagctgcctggaatgcttccagactcttaagctggagaactgcattgtcagccccggcctccttgataaagcggataccgtctgccgtagccttctgtacggaacggatggcctctgcctggccttccgcctctctaatcttcttctccttctctgcctcggcggcaagaatagctgcttctttctcaccctccgcattcagcacagctgactctttgtggccttccgccaccagaaccatggacttcttctcgccctctgccctcaggatggattcacggcgctcgcgctctgccttcatctgtttttccatggcctcctggatggctgccggaggaatgatgttcttaagctctaccctggtcactttgatgccccatgggtccgtggcaatatccagggactcctgcatcttggcattgatggtctccctggaggtcagcgtttcgtccagctccaggtcaccgatgatattacgcagggtggtggctgtcaggttctcaatggcaagtaacgggcgctccacgccataggcatacagcttcggatccgtaatgtagaaaaataccaccgtatcaatctgcatggttacgttatccttggtgataaccggctggggcggaaagtcctccacctgctccttcaggtttaccttcttggccacacggtcgatgaagggaaccaggaaatgaatgcccacgctgtatgtgcccaggtaggcacccagcctctccaccaccagagcctgagcctgaggcacaactctgatacaggtggacagaacaaataaaataatgactgcaatgatgatgaacgtgataaatcctccgattgctccaaacatatgaatcctccttatgtttctttatgctttttcaacttcatgttcctgcttcgccgcagctaccagcagctttgccccgctgacagcggatataaccaccacatcacctgcttcaaaggtatccccctcctctgccgccctggcaagccaggtctcaccggccagaatggcggtccctgtacctgccacattatcaatacggtccttgaccacagccttgcggcctgtaagactgtcaacattggtttttgtccgcttgccgtacaggtacttgtaagcaaagggacggaccataagaaacaacatgaaggacactgccacaaacactgccagctggggatacagaccgcctccgcacacctgcaccaccagcgcggccaaggaaccccctgcaaaccagatgctggtcagagatgtggtaactccttccactatcagaaaaaccacaaacgcgataagccaaataagggacatgtaaatctcctttcatctgcacagaatatggagaaaattggttacttattcttattgtatcatagtcagatttaaaatcaatcaagggattgtaaatttatcatattcttaatataattgtaagcagtacgaaaggttatggggcagtaaagacgctgctgctgttattatatgtttttgcaaacaggttatacttaacagtaacttaaacacacatgattaagggggcacaatatgaaacgcatactcttactgggaacaggcggcaccattgcctgcaagcgcacggataaggggcttaagcccgtcattacatcggatgaaatcctgtcctatgtgcctgacagccaaagctactgtgaaatccactccatccagctgatgaacatagacagcaccaacatacagccctgccactggctggcagtagaaaaggcgattgaggaaaactacagccaatacgacggctttgtcatcacccacggcacggacaccatggcttatacggccgcggccctgtcctacctgattcagcattcgccaaagcccatcatcatcaccggggcccagaagcccatcgacatggagaatacggacgccaggaccaacctggccgacagccttctctttgcctcctgtcccggcgcccacggcgtaaacattgtctttgacggcaaggtcattgcgggcaccaggggaaagaaggagtggacaaaaagctatcacgccttttccagcatcaactttccgtatgttgccatcatccaggacggtcagattatattttacctggacgacaaggacagggacaaagaaccggtctgcttctaccgtcaaatggacggggatgtggggctcatgaagctgattccctccatggacgcttctctgcttgattacatggcggagcattacgacgccgtcatcatagaatcctttggggtgggcggcctgccttcctaccaggacggggattaccacggcgccatcgcccggtggacaggccttggaaagactgtcatcatgaccacccaggtcaccaatgagggcagcgacatgtccgtctatgaggtgggccggagcatcaaacaggaattcggcctgctggaagcctatgacatgaccctggaggccgtggtcaccaaaatcatgtggatacttggacagactaaggaccctgcccggatacgaaggatgttctacgagaccgtgaaccgggacatactctggaaatggagtgaaaattaataccctgcccctttggagacagtatattgacaggagatatccgcgatgaagatagcagtaatactaacccgttttttgaaggactatgtggagtcctattttaattccctttcccttgactgtgaattatcttattatatctacaatgattttgcccatgcaggggaattatatctggaattggagaaatcctacgacggtttcctggtcagcggacctgtccccagggccgccatctgccgcagggtgccggtactcaccaaacccattgtttccttcggcagcaacgccctctgctactacgagacctttttccaggtgcagtttaaagaacaggacttttatctggagagggggtatttcgacctgctggaatggctgccggaaacagttcccctgcaccagtacctggagcggggccagtttaaccagctcatatacaaggtgtaccagaacacctccacctattccctggagcagctgtgcgagatggaaaagaaaatcaaactcaaacacatacgcctttggaatgagaagaaaatccaatactccgtgacccgcttcagcaatattatacaggatttgctggacgccggggtaaacacctatttcgtctaccccaaatatgagatactgcaggaatccgtcaccctgctgctgcaggagatacatctgaaaaccattgtacagaaccagaacgccatcacggccttaaaccagcagttttccgacggcgcctctgtcatggctccccagctttccaaagaccctgacgcctccgcaccgcttacctcccggagccgtcagctgtcccaaaaagccggcatctccgtatcctatgcggaccgccttctcacagcgctgtccgccatggaccgggactgcatcacttcccaggccctggcagcagccctgcacattaccccccgcagcgccaaccgcctccttggcaggctttccgccaccggtattttcctggagctggaacggcagccgtcctttacaaggggaaggccggaaaagatttaccagtttcatcccgaacttatttcatgaacggcaggatatggtttggaaccgccggaaatggttcaggagcaacgggacatattccataatggactacatacaggaaaacagcagaatacagcaggaagccgtatctgataacgctgataacagagagaacacaaaacagcaaaaagtgagacgtcccggggaacaccccgtccgtctcacttttttgtcaatccgtcttaacccttatttccgtcccgttcacttttaatgggcattcagccatctgaccgcacagtgggcaaacgcagccactgcatgcttcatgccgctttcattgaatatgaccttggagttgtgactgatatagggatacccctcctgcttgtcccccaggctgaccctgaacagaacgccgggcgcctccttcagaacctccgcaaaatcttcccctcccattatctggggaagcatcatggttccttcctctccaaccagctcctttacatagccgaacatctcatcgcccacctggaggtcattgaccgtggccggcagttcgcttggaaattccacctctgcccggcccccgtacatggctgctgtctgttctgaaatctccttcagacgcctcttggccaggcttctcacattctcctcataagcccggatactgccgcacataaatccctgctccggtatcacattccctgccctgcccgcgctaatctgtccaatggtcagggccagcgcgcttcccctgggcttttccgagcattcgatggactgaaggccattgtatatctggcacagaatctgcaccgggttgaccccggattcaggactggccccatgggcgcttttgccccggactgtgatccggaacatatcggcggaagccatcatgggtccgcgggtatatccgataattcccgtaggcacatgatcccttgccaccacctggtggaaggccatgcatgcatccacatccggcgaacgcagcacccctgcttccaccatggtgcgtgcgcctcctccgccctcctccccgggctgaaacataaacttgactttgcccctcagaaggtccttgtgcttcatcaggagctttgccgctcccagaagcatggctatatgggtatcatggccgcaggcatggctgattccgggatgtttgctggcatattcaagaccgctttcttccccgatgggcagggcatccatatccgctctgagaagcagcgtcttacccggcttttggctgtccagcacagcaacgattccagactggcatatgtactccggctcataccccatatttttaagttcccgctccacaaatgcagctgtttccggcaggtccatgagaagctccggatattggtggacatgacgtctccacccaatcacttcctgctcaattccttctgcttcctttaaaaaatccaccatgtcaatcctccttaccagggcatcgtcattccatccggtatcgggcacttgtagctgcggccctccatctgtctgtcaaattcctctttagcctgtgcaatcagttccggcttttcaatgagcttaaggccgtataacgccattaccttagctgcgtaaatcattcccttttcaccgatggagcttcccgcgcaggatgcaaactgccagctgtgggcaggcgcccccatgttggtgcaggccgtaaagaaataggcggttggaaccagatgcatcacatcccccacatcggtggagccgtagctgttaaagcaggtcacctggcccggtccggtgtacaaatgtgtatccgcagacaggccatattttttcgtggttgccctggcagcgtccgcagtctgttcatccagggctgccgcaaagtccagttcctcctgtgtccatggttcctgcggaatctcgttcatggcttctgccaccacaccggccagcacatgattgttctgggtgttatagcagcctccaaggaattctatttccagctctgtctccgtcatcatggccgcgccttttgccaccttcacaagacgttcatacacattttccaccacttccctggaaaatgctctcatgtaataccataccaccgccttatccggcactatgttgggcgccacgcctccgtccacaatggtgtagtggatacgcacatccgaaggcacatgctccctcaggtaattggcaccgatatcagtcagctccacagcgtccagagcacttcttccgttttcaggcgcattggccgcatgggacgcctttccgtaaaagtggaatttggcagagttcactgccgtggaaacgcccactgttgcctcgttgattttgttgggatggaaattcaccgccacatctaacccctcaaaggctccgccctttgccatcaaaggttttcctgtcagcagctcttccccggggcatgcatagaatacaatggttcctggaagatttctctgaatcatctcctccttaaggccaatcacgccggccacatgggcggaacacagcaggttatggccgcagccgtgtccatagggctgtccctccaccggctccttgttgaccgacaccttctggctgagtcccggcagcgcgtcaaactcacccaaaaatcccatgacaggatgaccgcttccatagacagcctttatggccgtgggaacacctcctgccccggtttccacctgaaatccttcctcacgcagcaaatccgccaccttctcctgggccttatattccttgaatccggcctccgggtgattccatatatattggctcaggctgtcgattttctgcctttttctctcaatttcttcaattgcaatctgacctgtcatatactcaaacgttccttcctttagaaaataataggaccaataatacttgcaaacgcaacggatgcaatggtcactgtaacgaaaccgccgataatcattttaggcagtatataatccatggccttctgtctctcatcaccttcccactcaaaggaatcaacgccttccgtggtgataatctgggtggccggataagccagcatacaggttacgccaaccgctgccgatgtgtagggagagcatcccagcaccttgcccacaataccgcagataacaatgatgccgatggagcagattaaaaggataccgaataccggcacgatcattgacagcagtccggaaggtgaaagggttgcaaggcttccgggcagcatcagtagcagaccgaaagtgatgatacctgaagaatttgcttttgcaaagatatccttttccaaaaatccgattctggcaaagataagtccaaacagcaggtaggcaatgttcgggttaaggatatagttggccggagaggatcccggtatcagtgttgcctttcccacaaaatcagcgatacaggccaccagggccactttacagatatagatggtattgcttctcaggtttttaggcgtctctttaaaaatacgcatgctgggcagcttaaggctggatttttcttccaccgtattgctcttgaagaaaccgctgccgcgcttgattcttaactccttgcggatacagaatgtggaaatcgggataccgaaaaacttctgtacggacagtaccagcactgcaaatgccgccagctccggacggttagcagcttccgccgcacttgtaactatgatgcctgcaaccgtggaacctgccactggaggcgctgcaatcaacgcatactctcttccgaacagcagggaacccactgtaaaacaaatcagtgcaatcgccgcaatggcaaacagtgaaataaccacggttttccattcccgaatcaggtcttccagattaatcagcgtaccgatattggtaatcatgaatgccgtaccaaaattcgccataaccgccaccagaccggactgggtggtaatgtccttgggcagcaggccgctccagaaccctatgaggaacaatacacaggcaaacaacagtgatgaaacagcccccttggtctttttagacaaaaattcaccaaccgaataaaccaccaggcatcccgtaatacaggtcaacggattccaaaaactcattcccatttcctcctaatcatcttttgctttttcactttttacctgtgcgcacatgttccatacgcatatttaaggacgttttgtctttaaaatccctttgaattaaggacgattttatgcgtattttttattgcttcaataatatcatttacaataattatatccatatgcctatattttgtcaattaatattttattttttggacatttccactattattcgtcttttattttgtctaatataatgtccttaaatacgtctttattttgcgggaccggattttccagttgaaatcactaaggcccccattcctctcacccactccgtatctttgctcctgcaccgcttatctccaataaaaatggcatgcccggactgccggcatgccaataacatatatgggcccgcatcaatatggcgttatcttaacaacagattgacacggtatatttttttctttcccaggcagggaagagacagcggacgcgttggaaatgcagcgggtgaatggcgggtgagcggcgggaacagccgcctcccggactgcgtttacgcctctcacggacgcagctcctcccgcgggtccgggtcccctcccccggcacgcatcctcacctcattcaacaccgtaaaaccaagtatcattcctcctcccaccacctgaaacacagtgatggtctcatgcaggaaggtcacggataccaggatggccacaaggggatctatgtagctgaggatagaagcctcctggcccttcagataacgcagggatgaaaaatacatgcaatagcatatgcctgtgtggaacacccccaccaccagaagatttatcaccccaagggcatccatatccaaaagatgggaacccccagtcaggcatacatagggcgtgagaaccagaatggctgccaggaactggaaaaatgtccggttgatgcccgatacatggcgtatgcttttattgagcagtaccaccgatgcataaaatacggcagcacccaggccgaacaaaatcccaatcaaatcactgctgctccctcccctgctgacgcctatcaccagcaccagtcccagtgtggacatgataaaacagaacacctggcgggcggtaagcttttccttaaagaggaagggacttgccacggttacgatgacaggggcgaaataatagctaagggtagccattgcaaccgtggtataccggtatgcctcaaaaaacagtatccagttgattccaatggccgcccctgacagaatcagaaggtgcagctctgcctttgcatcctttatccctgtcccctggccgctgcacagctgccagaggaaaatggcgccggcagcaatcagggcccggtacagggccagctctcctgacggcaggggtatgtgtctcacaaaggctcctatggtgccaaaggctgccatggaccctatgatctccagttttgctttcatttgttctctccttccgggactcgtccatccctatatcaggcccagggtacggatgaggtccagccacagcgtcagggtgaaggcactgccgcaggttgtgattgccaccacactggagctcagcacgccttcatgtcccatgttccgcgccatcacaaagcagctgacagttgcggcagaccccagcatcacaagaatcgccaccagctgctgctcccggaaccccaggtacactgcggccggaaggaatacggcgcagagaagtaccagctttatggcgctggcgcccgcagctgccccgactctctgggatgcctgcctgaagtcaaaggacgcacccatggccatcaggcccaggggcgtggccactcctgccaggctggacacggttttttccatgatttggggctgcttcagtcccagcagtgaccaggccatgccggtcaggattcccagtatgatgggattcttaagtatgcccgccgcggttttccccagcatccggcggtcaaggaccgccccttccggatttgtaaaggacagaatcaccacagccatcacattgtacagcgggacgctgcctattatcatgagaggcgccatccccacatccccatatatgttcttaatgaaggcaatccccagcagggccgcgctgctgcggtaggaagcctgtatgaattcccctctgagcctcctgtccttaagtgccatggacagaagaaccgccagcaggattcctcccagggtagagacaaagcagaacatcacaaacctggtatcccacaccttcaaaaaatcagaatttgacaggtcctcaaacagcaggaccggaagagccaacttaaacacgaactgattggccttgtccgcaaagacaccttccataattcctgcttttttgaaacacgctcccaataccataagaaaaaagatgggcatggtcgcattgagactgaatatgagatgttccaccgcagtctgcctcctgtcttttttgcacattttccctgtaacaatatacgctggctgtttctttgtcaagtctttcaagagcctttaaggattttcttattgacattttatccgtcaagtgattaaatagaattgacttattaatattattttaaaaagttttttaataacaatgtaaaaggagagaatttttcatggcccaggaagaaccggtcactgtaaaacaattgaataaagaacatatacgagcttacatgggtaaacatacatctgcttccaaaagccagattgccagggagctgggattaagtttccctacggtgggacgtctgattgacgaactgtgttctgacggggaactgaccgagcaaggggccggctcttccaccgggggcaggtgcgcctgcatttatgagctgaatccccttttcagcctgtatctcctggtacaggttgagtcggaccgggtatgctggaacctgaaggatttaagggagaacaccgtggagcaaggatgcctgccctttgaaatcctgtccctggaacagctggatgccctgattttagatatccatcaccgctatccccgcctgaaggctgccgccgcagggattgctgccctggtaaatcacggagtggtggaggagaccaatcaatatatcggactcaaaggcctgaacctggaagagcatttccggcgcctggttcccattcccatgacagtgggtaatgatatgaatttcctgaccatgggatgctgggctcagaagcatcccgatgccggctccctggtcacactctttatgggaggaaacggtataggaggcggaatggtcattaacggccagctgtggaccggcgcctcaggctattgcagcgaggtcggcttcctgcctgtctatgaacgcttaaacaagggcagcctgggccttccccctgccgagcacataagcgagctgtacgcccgcctgatacaaatttatgccgtgacggtaaatccccacatgatggtgctctaccgccaccccctgctggagggaaggttagacgagatccgccgtctctgtgcttcttatctgccatccaaagcaatcccgtccattgagctgtcctatgattaccagcaggattatgaaaaaggcctgtttaccgtggcaaagtccatggggcaggctgtaagcgaaggaggtttataatgcgctacacccattttgtgtttgatattgacaatacgctgattaataccacaggggccgtgctccacggactccagagagccctcagggatgtaaccggggaacactgggacttaagccggcttactccggttctgggcataccggggctggatgcatttgaacgtctgggcatacattcccctgaacagatattccagatttatccccgttgggaacagtatgaacaggagtatcagtacactgcctatctgtatgagggcattgtccctctgttggattccctgaaaaaaaagggctgcgtcctgggcatcatcacttccaagacaatgccccagtacaccagcagcttccttccttttcagatatccgaatattttcagaccgtcataacggccgatgacacggtccgccacaaaccggaccccgaacccatgcttgcatatatggaacgcaccggagtctgcccccggcagattctctacatcggggacagtatctacgacatgcagtgcgccgcccaggccggagttgactcctgcctggctctgtggggatgccactgtccggacggcatcttatccacccaccgttttgaggaaccggctggaatgatgcgctggctggaatgatgtaccggcccaagtcggatttttccgtcagcggtgtcaatctggactggttaaatattatctaactggatatttcactcagtccacctttccgttatagtaggtatcaacatttaagtactttaactttaggaggtatccctatgacggaacgtttctctactaaaaaactggtgctgtccgccctctttgcagccctggcctgtgtggccactatgtccatccgcatccccacccccggtacaggcggttacatccatcccggcgacgccatcgtgattctctgcggcgtgtttctggacccggtatccgcattcctggcagccggcatcggctcctgcatggcggatctgctgggaggttattttatctatgtccccatcacttttgtcattaagggactggtggcattctccgcaagccatgtctgcggcaggttaagggccagaggcatgaatccgtatgcagccgtggccggctgcggtgtgattgacatcattctggtggccggaggatactgcctgtgcgaaatattcctatatggattaggagcagccctggccagcgttcccagcaacattatccagggaatcagcggcctgattatctccagcgccttgtatccggtcctgcaaaagccgctttccatggctttaaaggcttaaaccgcatcctgcatctgcactgcgtcctgcacctgcactgcatcctgcatttagaccgtgtccagcatttcagccacggtctctccgtaaatgggatggcgcttatatggcgctatctcggccaaaggtttcaggacgaaatcacgcttgtgcatctgtgtgtgtggaatgctcagccgttccgattcatacaccagatcgtcataaaaaatcacgtccagatccagggttctgggaccccagtgtatgatccgctcccttcccgccgctgcttcgatttcatgaagggcatccaacagctcctccggtgtatagagtgtttttatttccatacagccgttgaggaaatcagcctggtccgtcaccccgtaaggaggcgtttcaataaagccggatacccggcccacacggcactcccgaagctttccaagggcctccaccgccccggtaagatacgccagcctgtctcccatattagagcccagggcaatgtatgcctgatgccatcccctggtgatcctgactgatacatattgaaggggaaggcctatgggggcccagggctttcttatctctaattccacggatttcaggctgtctggatacatgagcagcagttcctccgccagtttttccgccgcgctctctatgagctggaaggtatgctccctcagatagcgttccatgaatttgcttgccctgccgtagctgatggtctggtccagctggtcattcctgcccgcctttctcgtatctgtaaagagcactgccgataccagaaacttctgtcccagtacattttcctccggtatggccccgtgttttgcaaatacctccaattgttcaatcctgatttggtccatgtcctgcccgctccctttctgttttctgtatgatttgatcccatgtctgcatttcatattccggttcctcatttaaactccggggcgcccataatagaccgggccatcctgacagcccttttattcccctccacatcgtgtacgcgaacaaaggaacagccagaaaagacggcggccgccgtcgtaaccagggttccctcttcccgtttgtccacaggaagatccagagcaaggccaatcacagacttcctggacgcccccagaagaaccggatagccgaaacgcttaaaagcagacaaattccttatcacttccagattcatctcatatgtctttccaaatcccacaccggggtccagcacgattctgtcatcctttatgccggcctgttttgcaaggagaatggtttcattcatctcctccagggcggtattcataaaatggtgtccgacagggttttgcctgttatgcataaggcagcagcacacccccagctcagcaatggtccccgccatgtccttatcttttttcagcccccatatgtcattgaccatggcggcgccggcctccacagcctgccgggccaccccgctcttataggtatctacggagatgggtatatcaaaattttcatgaatcagccggatgacgggaaggacccgctccagttcttcctcctccccaaccggcctgcatcccgggcgtgtggactcccctcccacgtctatgatatccgcaccgtcaaacaccagtttctccgcctgtctgagagccatctcccggtcacagtacctgcctccgtcggaaaaggaatccggcgttgtattcaggatgcccatgacataggttctgttccatacatcaaattctttttgtcctataatcatctgattacccccttaccatttggaaaaacaggtttaccaggttctcccgctggcagaagcaccccctctttaccaccgtgacagtccggctgcccggctttttgattccccgcatggtcatacacatatgctctgcctccatcatgaccataacgccccggggcgccaatccgtccatcaatgcgtctgctatctgggcggtcagctgttcctggatctgaaggcgtctggaaaatacctccaccgtcctggccagcttgctcagtcccgccaccttcttatccggcacataggcaacatgcactttcccgtaaaaaggaagaagatgatgttcacagacagaataaaaggttatgtccttctccacaatcaggtcattattttccgcccggaatgtcttttccagatacatccctgggtgttcatccatgccgctgtacagttcctcatacatcctggctacacgctcaggcgtatcaatcaacccttctctggacgggtcctcgcccattccctccagcagaagcctgacagcctgctccactttattcctgtctatcatccctgttcctcctttctgtctccttcataatctgccccagataagacagggagccaaagaccagtacggctccctgctctccggcgtctttcagtgccatgtccaaggctgtttccaccgaatccactgcctgcgttccggcacagtattttccggcctcccttgcaagtatctccggattcaggcttctgccgcggtccggcagccataccgtatagattctttctgccaggggagccatgatttgcgtcatcaggccgtattccttgtccccaaacactcccataataaaaatcaggcgcctgccgttcaaacaggtttccacacattccctcagcctgagggccgcgtccctgttatgcgctccgtccacaatcaccatgggggatttcttaagcatctggaaccttcccggccaggaaacattggaaagtccctttctcatggcagattcaggtatgtggatgcctttgcggctcagggcagaggctgcctccagcgcaagagctccattctccaactgataggtccccggaagggatattctgattccttccatggccttataggtaaacacattttctgcatactccccgcgattctcctccctctccggacaggatagggcgctcaggctgctcatatccacctgggtaaagacgcatcccttttcaccggcgcggtccttcagtacgctgagcacttccagaggctgatgcgccgagacaacttcacagcccggcttaatgattcccgccttacaggcagcaatttggcccagggtatttcccagcacacccatatggtccatgctgatggaagtaaaaacagccgccagggtattctccaccacattggtggcatcctgttcccctcccagccctgtttccagcaccaccacccggcagcccttctctttaaaatacagaaaggccatggctgtctctatctcaaatacagtggggattcctctccccttttcttccatgcgccctgccgccgccttcacccggtccgccaataaggcaaattccctttccgtaatccaggagccgtccacctgataccgttcccgcaccgagataacagccggcgaggtataggtgcctgtacggcagcccgcctcctttaatatggaagaaaggcaggctgacacggacccctttccattggtcccggcgatatgaacaaattccaaatccttctgcgggtccgacagctccctcagcagatttcttatggaatccagtcccatgacgcttcccagcccagacctctgctccagaaaatccaacgccccgtcaaagtccatcctctccccagagtccgccgtcaccccaaaatccaccgcctcattaaaatccatacctgcctccttcctgccatccttacatcttacgccttctgcacgcagcatcccattctgcagcctgagggggttgcggcgcagccgcccagggctgtttccctcagctccaggggaagccctctgccaactgcatacatggcttccagcatttcatcaaacggaatcagctgccgtataccgctgagcgctgtctccgcgcagaccagggcgtttgcagcccctgccccattccggttctggcaggggcattccaccaggccgcccacagggtcgcataccagtcccaaaagattcatcagggcagcggacgcagcgtccaggctctgggcgggagttcctcccataagctccactgcggcagccgccgccatggcgcaggccacgcccacctctgcctggcatccccctaccgcccctgacacggtggcgttgcgcatggccaggtatccgacggcagaggctgcaaacaggccgtccgccaccaagtcgtcctccaggccgtattcctcctggagggccagcagcagtcccggcacaatgcccgaagacccggctgtaggtgctgccacaatcagtcccatggaggtattaacctccaaaacagccatggcatatatgacagccctgcccaggacgccgcttaggatggaggtgccctttctgcgccgttcctccatcctggccgattctccgccaatcaggccgccgatggatgtgaccggttctctcagcggaagggtggctgaatccctcatgaccgccagtacatccttcatcctggcctccatgtcctccatggatacgcctgttaaatcacattcacgctgtttcatcacttccgatatagtcattccccggacagcgcactgctccagaagctctgccccgctcttaaaatccatgtccatccctccttatacctgaaccagcatggtatggtatacatgcgggttgctgttaatccaatccgtaatctccagaggcaggcgttcatcagactccacgatgcagtaagcctgtgctcctttttcctccctgaaaagcttcatgaaggcgatgttcacattgcagtcgctgaggcacttggaaatatgggccaccacccccggtttatcctgatgtatgacaatcagggaactgtactcgcctgtaaagtccacatccacctggtttatctttacaatgcgcacctttcctccccccagggattccccccggaccgtcatctcctggttccggtcatttaccatgcggatatccactgtgttgggatgtacgtccttatccttctcgtttgtcaggaaggaataccgcagtccccgttgctgcgcgatggaaaaggaatcgcggatccgcctgtcatctgtcttaaatcccatgattccccccagcagcgccctgtccgtgccgtgtccgcggtaagtcctggaaaaggaaccgtacaaggtaaactctgcctcgataatctgtcctgctatcattttctgggccaggagggctatggccaccgctcccgccgtgtgtgaactggaaggccctatcatattggggcctaatacgtcaaatgcactgatgactgccataaacttattcctcctgacattctgttctcctggttactgtctgctcttaagcttgcccggagcctgtctgggaaccgtgtggatgctgcagccttcaagctcctccagcgcctctcccactgcctcattgtaggtgggatgggcgcgcattcccagaagcagctgtggtacggtcagcttgtttgcggctgcggttgccatctccccgatcatgtccgtggccctggcgcacatcatctgggctcccagcaccaccttggtgtcggcttctgcgatgattttgataaagcctctttcctccctggatatctgtgatttcccgttggcagacatcaggaatttccccactgatacaggtattccagcctgggccgcctcgtcctccgtaagtcccacggacgcaatctcagggctggtgtacacacagctgggaactaccgataaatcaatggagtgtccggttcccgccaggtgttccgccacccacacgccctgggcactggccacatgagccagctggattcccttaatcacatctccgatggcgtacacgccctccatggatgtctcaaaattggagtccactgtgattcttccccgctccatggcaagctctgtccctggtcccagcagcttttccgtttcaggcaccctgccggcggccgacagcacataatctgcttcctcccgcttctcctcacccttttcctcaaagacacaggccagaccatgttccgtcttttcaattctctttaccatggcccctgtatagattttgattccccgctttttgagaatcattttcaggttctgtgaaatgtccttatccagatttgccagcagtctgggaagggcttccacgatggttacacggatgccaagggatgaaaatacagatgcaaattcagctccgattacgcctccgccgataatcagcaggctttccggcgcatgctgcagccccaacagcccgtcgctggtcagaacccccggcagttccagtccctcaatgggcaggttcatgggttttgagcctgaggccagcagcacatgcgttcctttcagcacccggctctcctcttccccttcgcaccctgtcaccagcacggttttgtccgcctgcagggtgccggttcccttaaccagtgtcacgttgtttgccttaaagagctgttccactccctgtcttaagcttcctgacgttccctccttatattccagaatcttatcatactcataccggacattctctgcaaagatgccgaactgcccgccctccttcatctccctgtaaagctgggacgcatgaatcatggctttggccggaatacagccacggttcagacaggttccccctacctccctgttttccaccactgccaccgaaagtcccagcttggcgcccttgatcgccgccacataaccgccgggacctgctcctataataaccaaatcaaatatatctgccatctttcctcctattgccgccaaagagcgctggagcgtgtctgaaaattcatttcaacacgctcctgagcactgcctgtattttttcgtaaatcagttacttactccccgatatagcgcagcaccggctttcttgccgcagttacctcgtccagcctgcggaccggtgttttgaccggagcctggtgaaggctctgcggatctgcctttgctttttcatatatgctgcggaacacctcaatggcttcgtccagggtttcctttgactctgtctcagtgggctccaccatcagggcctcatggacaatcagcgggaaatacatggtggggggatggatgccgtaatccagaagtgccttggcaatatccatggccgacacattgatatcgtgcttcaaatcctccagcgtcatcacaaactcatgcatgcaggtttcattgtaagccatctgatacaggtctgacagcttattcatcatataattggcatttaacactgcattggatgacgcctcgggaatgccttccctgcccagggtcatgatgtaggccagcgcctttaccaccaccccgaagtttccatagaacatcttcacgcttccaatggattgcggccccttaaccataaagcccggaaggaagggacgcaggaattccttgcagccgacagggccgcttcccggaccgcccccgccgtgaggcgtggaaaatgtcttgtggaggttcaggtggattacgtcaaatcccatatctcccggcctcacaatgcccatgaccgcgttgaggttggctccgtcgtaatagcacagccctcccccatcgtggacaatgcgggtaatctccaggatattcttgtcaaagagccctaccgtgtttggattggtcagcatcagtcctgccgtgtcctcccccactgcctccttaagcttatccagatccacacatccgtcctccctggaggggatgctgacaacgctgtagccggccatggtggcgctggcgggattggtgccgtgggcagagtccggaacaatgattttcgtcctcttttcatcccctctggagtgatggtaagccttgatcagcagcagacccgtaaattccccatgggcgcctgccgcgggctggaaggtcattgcatccataccggttatctcgcacagatactgctccgccagatcgaataccctgagggcgccccggaccgtatgttccggctgcagcggatggatgcccgcaaagccctccagcgacgccgcctcctcatttacctttgggttatacttcatggtgcaggagccaagggggtagaaaccgttgttgacgccgtgggcgcgccccgcaaggccggtataatgtctgctgatttcattttcagagagctccggcagattcagcttctccttcctgccaactcctatctgatggaccggcacgtcgcagtccggaagcaggtggcagtgcctgccgggagttcctttttcaaatattaatttcatgctccgcatacctccttcacgatttgaaccgcctggtccatatcttccttccggttctgctcagtggcgcaccagagaatctccctgtggctcagaggcagtcctcccaggattcccttctcctccagagcttttaagattaggccgctgtccgtatcgctttcagtgacgaactcatggaagaattccctgtcatacctggccgtgaggccggcctgttccagctgttccttcaggtaatgtgctttggaggtacagagaacagcggtctttcttaatccatctgctcccatggccgccatatatacgctggcagtcagggcgcagagagcctggttggagcacacgttggagctggccttttcgcgtctgatatgctgttccctggcctgaagggtcagcacatacgccctcctgccgtccacatcctttgtctctcccacgattctgcccggaagcttccttcccatagctgatgtggctgtcataaagcccaggtacggtcctccgaagctgagaggcatgcccaggggctggccgtctcccaccgcaatgtccgccccgcattctgccggcgtaggcaggagcgccagggagatggggttgcagcccatgatatatttggctcccttttcatgggtgatttctcccagaaggctgcaatcctccagattgccatagtagttaggctgctgcacatagaagcaggctgccgtgccgtccattaattcccttaaggcgtccgcgtccgtgactccgtccttttcaggaaccatcaccacctgggctccgcttccgaagcagtaagtctttaccacctccgtgaccagcggatgggtggttgcggacagatataccctgcttctcttcctgtccctgcacatggccgctgcctcggctgctgccgtggccccgtcatagacagaagcattggacacatccatgcctgtaagctggcagagcatggtctgatattcaaatatggactgaagaatgccctggctgatctcagcctggtaaggggtataggatgtaagaaattcctccttggataccacgctctttacaatggaaggtatgtaatggctgtatgctcccgcccctctgaatatatgtttaaacaccacattctgttttgcgatttccttcatcttcccgatgacttccatttcgccaagcccctcaggaagctttaaaccgccttttacacggacctcccgggggatatgggaaaacagcgcctcaaagctgtcaaagccgatttccctgagcatttccagctgctcttcactggtattgggtacataagaacccatgggtccacctccttttcaagatgtctacagtgtttccagatatgcctcgtaggcctccccgtccatcagttcctctttgccgcttacgtcttttactttgatgaaccatgcatcataggggctctggtttacagattccggactgtctaacagttcctcgttgatttcctctacctggccggtaacaggagaaagtacatctgatactgccttcacagactccacatctgaaaatgcctcgcctgccgtcacatcgtctcccggctccggaaggtttacaaacaccaggtctcccagagcatcctgggcataatccgtaagtcctactgtcacggttgtgtcatccactgtttttacccactcatgggattttgtatacattaattcctttggcacgttcattttttatttcctccttgttttgagcatttcataatccctgcttatttctctctcttataaaatggaagcttcaccacttccgctccaaccctgcggcctctcacatccacctcgacctgggtgcccggctccttgtatgcaatatccaccaatgccatggctgccggatatcccagatacgggcaatgggtgccggacgtggtggttccaatctgctgttccccggcaaataccggctcatgctctcggatgatgcccctgcccgtaaccttaagtcccacgcgcttcctggtaagaggtcccttttcctgcaatgcctttttgccgataaagtcctccttatccatcttgacaaagatgccaagacctgcctccttcggagtgatggtgtcatccatctcatgtccgtaaaggggcatggatgcctccagacgcagggtatccctggctcccaggccgcagggtatcagcccttcctccctgccggcctccagcaaaagctcccacagcctgggagcgtcgttcccggccatgtagatttccactccatcctcgcctgtataccctgttttggagatgatgcagggaataccgtctatgcagcagtccttcttaaaggtataatacttatccgggatggcatccgggtccgccaccttcttaagtacatccagggcttttggtccctgaagggcaagctggcccacctggccggatatgtccttaagctccacatcaccggacacatggtccttcatccactggtaatccttatccttgttggatgcgttgacaacgatgaaatagctgttgtccttaattttatagacaatcaggtcgtccaccacgcctcctgcctcgttgcacatggggctgtatctggctgtaccgtcctccatgaccgtataatcattggtcagaagcatattcacattcttcagggcatccggcccgcttaacaaaatctcgcccatatgggacacatcgaaaaggccgcactgctcacgcactgccatgtgctccgcaatcactcccttttcgtactgaaccggaaggaggtagcctgcaaacggcacaatctttcccttatactttacatgcatgtcatacagcggtgtctttaattccatattctctgctccttttttccatattctatggttgtatctcaacagttccccaactgcttcgtctcatttccagtttcccggcagcttactggtacagcggatatttaccgcagattttgtcaacctcgcctctgatataatcagccttagcctcaaaatcagtggctgccagccagatgcactcagcaatcttttccatatcctcttccttcagtcccctggaggtgactgccggtgttccgatgcgcacgcccgaggtgacaaaggggcttctgggatcattgggaaccgtgttcttattcagagtgatgtatacctggtcgcagcggttttgaagttccttgccggatacgtccattcccctcaggtccaccagcatcaggtggttatctgttcctcctgtgagaatgttaaaaccctgccttttaagagctgccgccagggctgctgcgttcttaaccacctgctcctggtaagccttgaactccggccgcagcgcctcaccgaagcagactgccttggctgcaatgacatgctccaaaggtccgccctggattcccgggaaaatggccttattgaaattgaatttgtctgccgctgcctggttggccagaatcatgccgccccttggaccccttaaggtcttgtgggtcgttgtggttaccacgtccgcatatggaatgggactgggatgcacacctgccgccaccagcccggcgatgtgagccatatccaccatcaggtaagctcccaccttgtcggccacttctctgaaccgcttaaaatcaatggtccggcagtaggcgctggcccctgcgatgataagtttcggcttggaggcaactgctgtttcctccagtttgtcataatcaatgtacccatcctcattgacgccgtagggcacaatgttgaagtacagtcctgagaaattcacagggcttccgtgtgtcagatggccgccgtggtccaggttcatgcccataaccgtgtcgcccggctttaacatggctacgaacacagccatgttggcctgggctccggaatgaggctgtacattcacatagtcgcatccaaacagcttctttgcccgttcaatggcaatggtctccaccacgtccacaaactcacatccgccgtaatagcgttttcctgaatatccttccgcgtatttgttggtgagaaccgttcccatggcagccatcacgggctccgacacaatgttctcggaagcaatcagctccagattccttctctggcgtccgcactccgccttgattgcctcccctatctccttgtcatatccttcaataaaatccattacctgttcaaccattggttcatatcctcctttttatttttcatcacggacatatccatatgcccttcatcacaaacacatccatatgccctgtttccgcctccgaaaccataccacctccctgtttgtaccgcgcgctttttttgaaggaggcccgtatacacacatgccctgtatccatgacccggatatcaaaaaaagcgcacgaacaaataatgttcatgcgctctgtctttgtacctgaaagatttggcttcgtcggtgctatcgctttccagagtttcgtccagtatccggttcttttgcctgagagttcttcgcttccccttcggcgctgcctgtgcagtctctcccgaatccatcatccgattatataaaattgtcaacaaaagcatttctatatgattctgctttgtgctaatgtcatagtatcacacttaatattttcagtcaataggtaaaatgtgtttaatttttaacgcattttgccgttattgcattgtgttttttgccctatcagcagttttttcctgctcctttatgcacacgcggctgaccctgtaggagtacaaaagaaatgccgtcatgacgatggacagggctgccacaataatccaggcaatgttgtatgagcctgtcaaatcataggctgacgcaatcagagggccgcccagggcatatcccacgctgggaaacagactcaggaatccatagatttctgcgtaatgttttgtgccgaagatgccgctggtgataaccggagcgcttacagttcctatacaggtcccgaatccaaacaatattgccatcaggtacaggaagggctgatgtttaataaatatcaaacaaataacggaaagaaaaaacatggtatttccaaatagtattcctgccttcacaccatacctgtcataaatatgtcccagtaccaattttccgggaatagcaataaacaggtacaaggaggcgatggaggccgctgtggtggttgcatatccggcatccataaccgaggccggtatctgtgtaatgacggctgcagtggctgaaatcagcgtgcatcccaatacaaagcaccagaacatgggctttttctttacttccttcagcgacacattccactcccgctctgttttcctggcctttcctgtctctccctcctcatccgcgccgtatgccttggtccccatatcagcgggagtccgcctgatgacaagcagtaccagaggaaccaggataaccagcctggttatgcccacagccttatatgtaaaccgccatccctgggatgcgatgaggtttccgattatggggcttaatatggttccgcctatactggatcccaccatggcaatactcataaccagtcccctctttttcctgaaccagttggtaatcagtacgctgaccggaatcatagttgagccgcattcaaaaaatccgatacaggctgctgtcacgtaaaactggggcagggtgctggcaaaggaataacagtagtacgccagacagtttccaatcatacacaccaccagggctttgtgcatgtacggctttgacatgatctttccaatgaacggcgacataaatgccatcatcagggctgcaatggtgctgaccagcgcatatccgctcctggtaaatcccagatcctctgtcaccggttttgtgaacaggcttgcgcagctcaccagaggcgcataccccagccccataatcaggatacaggtcagcagtataagccaaccgtaaaaaaagcgtttgttttccgccatattgtcctctctttccctagacatgttctactggtttccatggaggtccagccatctcatggctgtcccggcataaatagcagcgcctttgacaagggcagactcatgaaaacgcaccttgggattatgctccacataccgttttgaaacatcctcgataccggctccaatgcacatatagctggctggtattttttgggaaatataggcaaagtcctccgatcccatcacatgataagcgcagaccgccttcagctccggctccagctccttaagcccttccacaatctcctggttcagctcctcattgcacctgacaatgggaatatcgcttatcacctcaatctccgcctttgtgcggtaggcccctgccacggaaggtacaatttcattcagccgtgcaatcagatgagacattgttttttcgtcaaagctcctcatggttccctgcaggacggcagtctcaggaatcacattggaggcgctgcccgcgcagaactgtccgatggtcagggctgtctctgagatggccgggcactcccttgcaataagctcctgcagcgccagatagacatgtacgcctgtattgatgggatcaatgcatttttccggcctggaaccatgtccgccctgtcctgtcagggtaatcctgaatccatagacccccgccatgggaaggcttccgtaggcaacatattccggggacatctgggctgccacatgcatggcgaaggcgctgtccacctttggatggtccagcacgccttcctcaacggctgccctggctccctggaaggtctcctctcccggctggaacagaagctttacctggcccttaagctcagactcatgctgcttcaaaagccttgcagctcccagcagcacggtagcgtgaagatcatgtccgcaggcatgcatcctgccgtttcgggacgcaaattcctcccctgattcttcctgaaaaggcaggccgtccatatcgctgcgcagcataaagcatctgctcccttttccaagaattccaaccacgcaggaaccattgaccttaatctcataaggaatccccatctcctctaacttttcccgaacaaacgtacttgtatcaggcagctccagccccagttccggcatggtgtgaagcttgcgcctccaggcaatcagatctgcctccatggtttttgcctcttccagtaattctctatacattcttttacccctttccttcagacaggctctttgatttttataactacttctccggagtttcgttaacttttatttatttctgtgatataatcttaccatagctcccgggcattcggttattccgaatattttatgggttataaccattttattattaggcaaattgtacacaaaaggggtaacatcatgaatttcagccatttagaatatgcaatgaccgtggcagaatgccggtccatcaacaaagccgcccagaggctgctggtctcccagccctatttaagcggagtccttaagaatctggaggaggaactgggctgccagctattcaaacgcagccacaacggaatccttctgacagaaaaaggaataaaattcatggacagtgcccgcatcatactgtatgaatatgagaaattaaaacagctgtcctgggatgaagcagaacagcctatggtgatttcttcctatttcgtatccaatattatgaggctttttctggaatttaaaaaacagtctgccaaacagtttccggaccgtctgacagaaatggggaaccaggaggtcttggagtcggttgcggcaggccgtacgcgtcttggtttcattctctgcgccgtagaaaaaaaggaaaaatacctgaggctggccagggacttccactgttcctgcgaagagcttatgacttccattccgctgtatgtaatggtttccagggagcatcctctctataagaaaccttccgtatccataaaggaattgtttgactatccctacgtgcatttcaatgatgtctccgccatctcctacctgaagttagtcggcctgtccgaccatcccaaccgcctggaggtagataaccgcgggcagttctttgatgccatcagagagggccaatacatctccctgtcagtcagaggcaaaacctcggatggacgcggattctgtttcgtgccaatcagcgacaaaaacctgtatctgaacctctattttgtgacccagacagactacaggcctaataaaagggaacgggaattcatacggtttctgcgggattttgcagccttagacggacaggcgccctgacaaaaaaggaccgtaaaagagaggacagcccactgtttctggcgctgtccccaatgctgtttcttctataataatatatttttagcttccaacgctctagcttccaactctttccgccaaactcagctctctatcagcttcatcacatccgccggccttaccggaatccgcttcacctgttttcccactgcattggataccgcgtttgccactgccgcggccacaggtaccacagaacactcgcctatgctcttggccccaaaaggacctgactgctcaatttgttccaccagccccactttaatgggaggcatctcctgtgcgttcagcatgtggtactgttttaaggtggtattctttacctttcccttatcatccagtataaagccctctgtcagggcatagccaattcccatctggaccgcgccctcaatctggccttccacgcccatgggattaagcgccttgccgatgtcgtggactgccgtgtaatccagtacctttacactgccgttttccatatccacctggaccttggcaaaatgggctccgtaggatacggccatggcgcaggaggcaaatgtgtccgcgcagcagatatccctgccatgggcctgctttgcatatttgatcacctctgccagggaggcagacgtatcaggcctggaaatgcagtaaaccctctgatcttttaaatccagctcactctcatccacttccagcaggccggaagcctccttaagaagctctgttttcacctgaccggcaacctttaacgctgcgctgcagctcacaaacgtacctctgctggaataatttcccatatcccagagcgttgcatcggtgtcggcctggacacattcgatgtgcggcatggggatgcccagtatctcgcttaccacctgggtctgggtggttacggaaccatttcccatatcactgacaccggtaaacatcacagccgtgccatcctcattcatcttgatgatgactcccgttgtatccggtcttacgccgaatacaccgttgccgtgggctgcaacagccatgcccacaccgattcggtacctgctgtccgcggcatcctcctgttccctgacagcctcctcgtatcctgacaattccattccctttagtacacagtcaatgggcctgggatttccgtggggcaggccgtccctctggtcaaacccatccggctccaccaggttcttaagctggagctggattatgtccatgcccagatcctttgcaatcctgttcagctggcactgctgggcaaagaactcctggggagaaccaaagcctctcatggctcctgccacaggggtgtttgtgtacaccggcacagcatgaaaccgcaggtttggtgtcttgtggttcttaaaatatttgccgctcatggcccagacaatgctcatggttccgcctgcatacgctcctgcattcacaatgacatccatttcctgtgccacgatggtgccgtcctttttcatgcctgttttcagatggagcttcatgctgtggcggttcctggatgagggaatatcctctctcctggtgtataccaggcgcacgggacgtcctgtcttcatggccagaagggccgtgacaggctctgtcaccatatcaatcttcccgccaaatccccctccgattccggggttcaccaccctgacccggctcatggggaggccgaagatccgcgacagattggttctgtgtccgaacacatcctggctgggcgtgtagacggtgagcttgccgctgctctcatagacagccagggatgtgtgcgtctcaatagccccatgatggatggcaggtgtttcaaagtcgtcctcgtagatataatccgcttccgccatccccttctctacatcccctgcctcctggaccacttcctcgatcacattggaatccttgtggatgggatatgccccctccttcagggcatcctccggctccaggtaatacggcagctcctcgtattccacacgaatcagcttcagggcctgctccgctatctttgctgtctcggctgccacggctgccactttgtctcccacatagcgtacggtgctgtcaaatacccgctccgttttctctccgtcaatctcctcgccgcagctgttgaacagggcatccggcgcattcttccagcacacaaccgcccggaccccttctaactgctccgcctggctggtgtctatggatttgattctggcatgggccacagggctgaacagcacctttgcatgaagcatatggggaagagtcatgtctccaacgtacttaaactgtccagtcaccttcagggcagcatccctcacaggcatatccgtgccaatcactccgtttttgggcgtctgtaattccatcctctacttcccctccttctgcatccggctggctgccagctgaatggccctgacgatttttacatatccggtgcatctgcacaggttgttggaaataccggctcttatctccgcctctgtgggatcgggatttttgtccagcagcgccttggccgacatgatcattcccggtgtgcagtaaccgcactggaccgctcccacgtcaataaatgcctgctggattggatgaagatggattccgtccgataaaccttccacggtctcaatggtcttacccaccgcattcctggctaggacaaggcacgaattcactgcctccccgtcaataattaccttgcaggcaccgcagtcccctgtattgcagccgcatttcacggctgtgagctccagttcctcccgcagtacataaagcagagtccagtttttttcaattgccacattgtagttttttttgttaatatttaaacatatctgttccatctaaccatctcctgtctgtcccggtatccttttctggataaaaaaaacataagcatgtcggcctttggtaaagaaaggtctccaaacttatgttccgcagtatgatataaaaagcccaagctttgcatttatctatatatttcctgattataccaattcagctataaaagtcaacattctcgaaaaagattgtcgctttatcacaacagagaacgacttttttaagcactttttacaaaaataaactttttttactggttttaccacccgatacttcccgctgtttctcaaaaaaaccttacaaattaaggcactttgccattttacttatcataaatatacggttttttatgcaagttgacaaaccaaaacaaatgacttatactcgcttcgtggaacttttaacatactccatgtgaaaattcctcacattcctggtccggcaaggccggtcagcatctggaaaggagatttatccaacatgaatgcacgaaatcaagaagtaagccattccctgtacgtctttgacagcaaaccgcctgttagcaagacccttcccatctcattgcagcacatcatggccatgtttttgggcacagtaacagtacccatagtcatagccggtgcagccggtgccgatgctgccaccaggaccatcatgattcagtactctctgatgatgtctgccctggccactatgatacaggtatgtcccctgggccccgtgggttccagactccccgtcatattctgcgcgggctttacctgtgttcctgtatttactccgattgcagcccaatacggccttcccggcgtgttcggcgcccagctcctgtgcgctgttatcaccattgcgctgggcttttgcgtaggcagactgcataaattctttcccactgtggtcaccggcaccatcatcctgtccatcggcctttccctgtatcccattgctttaaaatacatggccggcaatgccagttcccccacctatggccagctgaacaactggattgtggcctttgtaaccctggccgccgtcctcttcttcaacctgatgtgcaagggcgtggtcaagatggcctccatcctgctgggcgccgtggtgggatacgtgctggcgctgtgcatgggcatggtccattttgacggtgtggtaagcgccagctggctggcagtgccaaaaccctttttctacggtatgccgtcctttgacctgtccatggttctgccgatcctcttgattaccattgtcaatatcatgcagtccgtgggagatatcacaggcaccacggtaggaggttttgaccgagaaccccgcagcgaggaactgacaggaggcgtggctgcatccggaatcgccaccctggtaggcaccattttcggcgttcctgtggtttcttccttcagccagaacgtgggcattgtgtccatgaacaaggtagtgagccgccgtgtcatcaccattgcctgcgcaattatgctcgcccttggcatcgtacctaaattcagcgctctggtatccacccttccggccccggtcattggcggcggaaccctcattgtatttggtatgatcacgctgaccggactcaaattagtgtccagcgagcccttaaccgcccgcaacagtacaattgtaggcgtatccattgccctggccatgggactgtccaccctggaaggcactgcggccctggagaattttcctcccctggcccaggcccttctctctaaaccagtggttgtggcaggcgtcatgtccttccttctcaacctgttagccccaggaaaaaccgttgacgaagaagcccgggaacgcgctgccctggacgccgaataaccggacgcagccctatctacttaacacacacatccattcccgtccacctgctctccgagggctcatggattcccatttgatccagaatccgtgtcacaaagaaatccaccatctcctcaattgtccttggacgggagtaaaatccaggggatgcaggcattatgacagccccgtaacctgacagttttgtcatgttttccagatgaatctggttgtaaggcgcttccctgggtacaatgaccagggggcgccgttccttcaggcacacatccgccgcccgctccaaaaggttatgggatgagccatggcaaatggcggacagtgtacccatggaacaggggaccactatcatggcatccattccggaggatccgctggctatgggcgcgcctatggcatggacatcgtaatggtgaatcagctcctttgacccaaagatttcctgcagatattgttccacctccccggaaggggtatcctgcccaatctgccagccaagctcagactccaccaccagctttcccgcctgggtcatgcagatgcacacatgatggcctttctgaatcagcctttctatgacccgctttgcgtagattgacccgcttgccccggtgattcctactatgtattttcccatttgccatgctccttatcttactatttccttactggtaatcctttaagtccaccttgggatagcggacccgctccaggcatctgctctcctcgtttagtgtggcgtcaatccccatcttcgtctgtacgccccgctcgtcggaacagggatccagctcatgtccctgggcattgtggatatagaaaatatccctttcaggaatcacacggttggataccgcccacatcacgtctgcgggatcatagatatccacgtcctcatccaccacaatcacattcttaatgtttacatacgctgtcatggctgccagagccacatttttcggctctcccggattctttttcttcatctggacaatggccaggaagccgcttccatagggcggaatatgtacattggtaactcccttgctcacatactgggtatgggtcttaaggagaggctccctgggcagcacatttcccagattgatatgctcaaaggaggcgccgtttatggtctggtaaatggccccgttcctgtgggtgatagccttcacctgcaccatagggctgttccacggctcgctgtagtggcccgtgaactctcccagaggaccttccttctccctgtaatccggaaggatttcaccttcaatcacaaattcggccgtggctggtacatagatgtcggaagtgatgcatttcaccacctcaatcggactttttctgatagcgcccgcaatctctgtctcatccccgtcatagcgcagtccggctcccacatagataaccggatccgcaccgatgacaaccgcgatgggaagggctctcccctggctttccgcctggtcgtagaaatccttcaggtggcgccactcattgatcatgatgctgaacttatccttccccttcacatgcatcctctggaaggacaggttctggcgggttccgtctatctccttgctgacaatcaccccgcctgtgatgatggggccgccgtcctttggggcgtggatgggaaccggtatgcgttctaaatcaatctcatcccccatccgtatattttcatgacaaggggcgtccgccactacctgtggcttcacgggatgttccaggcaatctgccaggaaatccgtcatttcatccttcctgcagcccagagccagggcaatgccgtccatggatgccagcacatttccgcacacagagaattccttatccttgatattgtgaaataaaccggttctctggccctctgcctccagggtggccagcagggagccaatctcatacttccaatccactgcccgttctgtctcaaaaagcagtttgttatcctttaaaactgccagaaaatctcttaaatccttaatcccgctcattcactgctgcctctctttcttccaacgccttcttgccatattcccggatgagtgccatatcagccagcttgtttgccagcttcaaaagtcctcccatgccgatttcgtctgcgtcaacgccttcctgtccctggtccttggaccagatataacctccggcgtagccgtatacctcgttacagacaatattgattcctctcgccatcatcatattgtgcatggcagtaatggtggcctcttctccgccgtttctggttccgcccacagcaaaggcactgccgattttatccctcatgagttccggatacacatggaacagaggccgcatcctgctgaaaaaagccgacagctggggagtgggtccataggcataaaccggggaaccgaacaggtacgcatccgcttccataaactccttcaaaagaggttcaaagtcatccttcagacagcaccatgtcttatttttcttgcagtatccgcacccgttgcagggcgcaatctttttccccctcagcgttatcatactcgtctctatgccgtcccttgactctatgctttttaaggcttctcccagagcatattccgtggacttatttctcgggcttccgctgatacctaaaatttttgccatattactctcctcatttcatctgtattctgtgattgtctctgcagatattgtctctgttgatattgtctctgttgatattgtccctgccgatattgtccctgcctctactgattctcctgtatgcaccttaccagatcctctgccatgagctgggcggtgttcagtatctcctgttcatctgccagaaggaacctgccttcctccataaccgtcttgccgttaataaccactgtgtctaccgccttatggtcccctgaataaatcagcgttgccacaatgtcatggaccggacaggactttacgctcttagccgggtcaaacaggaagaagtcagcctttttccccacttcaatggaaccaaccagctggtccaagcccagcgccctggccccttctatggtggccatcctgagcattccccccgccgtcatggccaaagggtctttgtggaaggtcttttgcagcagggcgccaaacttcatggcctctaacatgtcgttgtcattgttggagcctgccccgtccgtgccgattgccactgtaattccggccttcagcatttctcccacaggggccacgcccgatgcaagatacatattggctatgggattgtaggaaacagacacatggtttctggcataggtactgatttcttcctctccgatggcaaccgaatgtacagccagcagatcagctcccagaagccctgattcctcataatgacggatcgcgctttttccgttcctctcccggctgattttgtcatccgttcccgtctcaaacatatgcatcatgatgggtgtggcattccggtccgcatattccctggtggccttaaggagttccagactggccccccagccggctgccggagccagccacacgcggtacatgccgtccccctcaaattcttccttcagggcagtcacatcggcaaagacgtcctcggccttctccaccagctccttctttccgatatcgcggtagccccggccgtacaccattctgacgcccatgtctttggcgatatccagctccagttttcccagcccctttacaggctgcagctgcatataatccgccaccgttgtcacgccgcaccggatggcctctgccagtcccagcttcacgcccgcagccacatgcctctcccggagcacggcgcctgccggggccatggacttgggaaaccagtcctccagactcaggtcgcttcccattcccttcatgatatcctgatacaggtgggtgtgggtgttgataagtcccgggaacagataccttccctttccgtccttaagctcgattttaagttcccccgccttctcctctatgtaagctctgtcccccacatgtgtaatcactccgtcctcatagaggatacctccatcctcgtatatgcggtccagcccatccacggttacgatgtgcaggttgttatatccttctctcactgcagtgccacctcccttaccagtttattggtataacctctgaaaaatctggagaaattgccgattgtaaacgccgcaatcaatgtgccttccctgacgccgtaaatggtgttcaggaaaatgagagatacgatgactgccagtaccaccagcgaaacatccactgcggtctttacattgccatattccttctggtactttacggaaataatcttaatcagggcctctcccggcatcaggatgacatcagccgaaaccataaatgcgatgctaagtccaaagaacatgcatccgatgatgagtactgccagtttcagtatataggtctcgggatggagtccccttacaaggaacatattgaaatccaccgcaacgctcaggaaaaaggtaggaatcagctgaataaactttgacgctgagaagctcttaaaatccacaataaattcgccgataaagaacaatacatttaacaaaaacgtgtacatacccaatgtcaacagaggacatatctgggtcataacattggtaaggctgctcattggagatgttcctgttcctgatttgattatcagggagatccccattcccatgaagaatattccaataagaagcatgatataacgccgggtcatctgtgaatcctttgcataattagtaccattagacataattgagtaacctccgctttcttttcatttggtttgcgtccgacccactgctctttccggaatttccgcgcggtacacatattatgtgtaatcccggagtctggcccttggccacgcttgacagtctggtcgtaagttgtccatttcccggcggatttctagaatagtgcgaccggcggaaatatggtgtgagtgtacactcctgtcttttggaaaaataatagtaatccgcgcatgcaccccgtccgctttcccctcccaattttattttaggacaaaaaaaacaacacgaatccgccgacctttgaaaaagaaaggtccacaaactcatgttgtacaaaatcaagccgaagctctgcacgcaactatttactccccgattatatcaatccaggagcaaaagtcaatattctagcaaaagaatatcgttgttttacaataaaacagcgattttttaagcatattgcacaagtgtttttcataaaaccgatacaaaatcctcccgcatggggttaaagatatccagaaggattccagccttcctgcatacgcatccatgctccacgccgtccagctttagcatggtatctcctgccctcactgtttttttctcaccgtctatattaaactcaaattctccgctgaccacatacgtaatctgggtatggggatgatgatgaaggctgcccacagctccctcctcaaaggtattctccacacacatcaaatccttactgtaagccagaaccctcctgacaaccccgggacccgcctgaaccggctccgcattctcatgaaacacccatctttcatccagcatgtcactgtctccttccatcatttaccgcagccgtcaaccgaatatcctccattataccaggccggcggtgctgtatagtccctattattatactactctgcgcgccccgttacaacacctcaaattcacaattgagcacggtctgatatagttcctcctccgaccggctctcctccagatcgtgaatcagggccgttgtcttcaccatacgcatcagcgtgaccacagccggtatgtgctcctttccatccctgctggccagacagaatataacccgcgcctttttctccccgaataccacaggctccctggtaaccagaaggctcaggcttgtcttactaattccctccgcccccttaccgtgcaaaagggcaaaggaatcatccgaaacagcataaaatccctgtttctctataaagccaagcatattggacacataggattcctccacaaatccccgttttaccagaaggcccgcgctcatacggaccgcgtctttccagtcagacaccaggtccgccctcatgatgcagtcaaatttcaggaaactgctgaagctcttcgggctgtgaaatacctggacggtctgatatcccagttcctttttcaccacgtccataaccctggccctggtgttctcgtccaggaatcccagtttctcctcaatggagtaatagctggataaaagggatttcctgggtatgcccagccggtccatggcggctctgtcctcgctctgcagtatcggattcaccgtgaggcagggctttggcaggctgttgttaatgcggatggttgacagcacataatcaatggccgcccagtccgggtaggatgagagcttataaatagggagcgtgtccacaatatgtatctggtactcgctcagcagtgattctttcagcatggtggtggttccatacccatggccgcacaccagcagcaccttcttatagggtgctcccttcatcctccggatgctggccatgaagcagatggtcagatataccagctcatcctcattttccagcttttcaagggtgtctgtctccttgcagcactgctttacaatgcttagaaactgctgctcctcaggccgcataagggaactgacattgtcgtggatatccacatggttattgattctctgaatcaggggaatcatgtggttcagcagtccctccaccaggtttgtgtccttgtcaaagggcatgttcatccgctttgacatagcggaaatcagggaaaatgtcacctcctgggtatgcaccgggtccacctccgctgtaccgcccgccattttattggtaaagtcaaacatcttcgccatcattgccatatgttcttctgacacaggctttccgatgatggcccccagcttttctccgaaacgctgatacacctcccggtcatagtcaggcaccaccgtgatatccagaggatagtccttgtcatggagaatgaaccacaccagaaccaccacattcgacatataccacaggtaagagctgctggtcagggtgcacttaagctcctccagcagtccgtccaccgccatcaccacgttggcaatggagatgccctcaaaggccttatggatgatgtggatacagtaaaattcataggaattgtactccgtaaaggggtttatgaggtattcgatgtatttcctgaattcctggttcatcagggtggtgcgcttaagcttcgggccggacagataaaaatggccggaatacccgattcccattccgtccttcttaagcctttcatccagtgcagccatatcgttctttaccgtggagcgcgaaaccctgaactgcccgctgagctggttaatctttaagtcctcattcctcataagcaggatcagcagcagaatggacatccgctctttgccggtatagaccacctcgtttccgtcttccaggcccttaaggtccagggactggggatatcgcagcagccccttggagtgtttttctatctccggcaggcgctccagagacaatatgtcgttgatccggtccacatcgtagcggatgctccgctccgatatccccagagccttggccatctccttgtaggtggcctccccgtgctccttcagataccggataatgttcagcattctcccattaaacatctcgttcttctcctgtctgcatatgcagacaagaggagcgctccccactcctcttatctgttatcatatggtatttttatatgctcccctgaattccattttaccggaatgagccggaaatccaaccggaaattttactggaaagaatcgtgaatcttcttcatcaccgcgtcagacttcttaatcaggtctgacacgcccattttcaggactttctttcccttgaagcggtccagtccctccagggccacgtcattgaccaaaaccacgcacaccgcctcgtcaatgtccttctgctttaactggttctccactcctgcgccgccctgagtctcaatcagcacttccattcccagcttctcgccggacagctttaacgcctcagctgccatatatgtatgagctactcccgatggacacgatgtaataccaactaccttcattgtaaaatcctccttatccttttctaatctctatttattaccactagtcacttattataattcgtcaaatgttatctcgtccaggtcatccaggtccgtgtcatttcccgcggattcttccacatagttcttcttaagtaagtttaccataagtgcggtcacaaatccacctgccagcactgcaataaagtaccagatacggccttccaccaccggaagcacaatgagtccgccccatggagcatgatttaagacgcctgccaggaatgggatgatattgcctaccacggctcccacaatcagggacgggattacccttaaggggtcgttggccgcaaaaggaatggctccttctgtgattcccacacatcccatcagaatagctgcctttcctgcttccttttcctccacattgtacttcttgggagccagcagggtagcgatgcccatgccgatgggcggtgtacagatagccacgcccacgccgcccataaggtagggaagcgtatccacctgtgtctgtgcaaagagggtggcaaccttgttgacaggaccgcccatatcaaaggcagtcatggctccgagtatggaggccagcggcaccttgcccacatcccccaggctggacagccagttggtaagtccgttcataatagcggcaatgggtccgccgattccccacacaatgataccgcctgttaccagggtacccaccagaggatagatgaaaatggagcctaatgttttcagtgaaatcggaagcttgattctcttcagttcctttaccacaacgcctgcaattaagccggccgccatgccgccaaggaatccggcgcccatctcctttgccagatacgccccaatcataccgggtgccagacctggtttgtcggcaatggagtaagcgatataaccgcccagtaccgggacaaacagtgtcagtccgcccaggccaatctgcgccagacctgccagccagccggtctcaggtgtggctgcgccggccggattcagcatgactgccagagaaaaaaggataccgccggccacaataaacggaatcatgtgggatgtacctgtcaatatatgtttctttaaaatcttcagctgctctttcattttcttacccctccagaacttcttctaatatggtgtatacctgttccctggtgctgcttctcaaagactccctgaactcctcatgcataagccttctggaaagattggccagtatctttaagtgggtgtcccctgcctcgcttaagggcactgcgatgagaatgattaaatctgctgtctcacctgactcctcattccaaaccaccggttccttggtacgtccgaaacatacactggcctccagcacatggtctgttttgccatggggaagtcccatgtcaaatcccacaaaggttggggtaatcgcttcccttgccagtacatcctgataaaattcctctgtgtccgtgatttttcccgccctgtacagctcccctgacagggttcttatgatatcctttttactgccttccatatcgaatacgatacagttctcattaattaacttactcatcccttgcctccttccggttcttccggaatttgtcttttattctcttacctgtttgccgctgctgtttgtttcttcttaagcgcttaagaaaatgtgtcaggcactgttttgtttctgtctgttctgtgccatcccttacatgcattatcataatcccggaccaggtttttgaacagatagaagatttgcaaaaattttttacacaaatcaacaccggtacagaaatacatatgggcgcgaacacaaacaaaatcacgaacacaaatcgaaccgcacacgaaaacagggccatgaaaacggacgcggttccgctgcatgaccctgtaacgcatgattatcaattcccacagacctggaaatgtaccttaccgccaggctgattatacctcctcaaatccaacaaaatggaggaatccggcaaatgccctccgtcccctctcatcgcatttatagacgcctgcatcctccaggacccgtgcaaacacctttcccacttcctcctgcagaatagaccacacattatccctggtcaccaggatgcccttttcctgatatccgggcatgaattcctccacccagtcagcgtgtttcagaaggacctcatcctttcgtatatcctttccatccaccatgtactctcccagcattgccagttccgtcttaagcctggaaggcagcacggccagtcccatgacctcaatcaggccaatgttctctttctttatgtggtgcagctcctgatggggatggtatacgcccagcgggaactcctcagtggtaatattattgcgcagcaccaaatccagttcaaaggtatccccaacctttctggcaatgggcgtaatggtgttgtgaggctctccgtctgtctcggcaaagataaatgcgtcctcatccgtatatcctctccatgctttcagaacaacatcccccagctcaatcagcctgtccgggtctgctgcccgaagcctcagcacggacataggccagaatacgattcccgcttccacgtcctcatacccttttatggaaaaatgcttctctatgggcgcttttgccatggcaaaggtataatgacccccctggaaatggtcatggctcaggatggatcctcccacaatgggaaggtccgcattggaacccaggaaataatgggggaactgcttgataaagtcaaacagctttctgaatgccgccttatcaattttcataggcacgtgctgtccgttaaatacaatgcagtgctcattatagtacacatatggggaatactggaatccccactgactgtcattgatggtaatgggaatgattctgtggttattccgggccggatggttggtccgccctgcataccccacgttctccatgcacagctggcatttgggatagccgctctgcctggccagcttggccgctgcaatggcctttggatccttttccggtttggacaggtttaccgtaatgtccaacgtaccgtagcgggtatccgtggtccacttcatatctcttgcaatgcggtaacggcggatataatcggaatcctggctgaaaccataataccagtccgttgctttctcaggagactcctcatagcgtttccagaattccttcaccacctcacccggccttggcatcaggcagttcatcagcttcgtgtcaagaaggtcccggtaaaccacgctgtcctccttaagcacgcccgtgccggcagcgcagtccagaagctcctttaaaatggcctccaaatccccgctctccaccggaccctggggttcttcatactcatccattcccatcacatccaggatttggttcctggcataaaccgcgtccgcctcagatataagccccttatccaggccgtactgtaccaatccctcaaccgcttcataaaccatagaaatatcctccctgtacacgcttccatctaagcacagccacataccgctgttttcttccattatatccctcacgccccgcaaccacaatgcacttttttacttttatatcctgattttcttaaatagtgcgaaacaaacggtttacccgccccaccagaattcctcccaaaaggccaatcagggctcctgccgcgcagcctgctgtcagcagcaccggcagataggaaaacacaccgaatgtattcaccacaaaagccgccatcagaaactgtccgatattatgggccactcctcccagtatgctgactcccaccatcccgaacagcctgaaccgtttgcacagagccatgacggtaaggctcagggcagttcctgcgaggccaaacaggatggccgaaggcggcccgaacaggatgcctgataagagtacacgcaccatgctgataagagcagtctcctttgttcccatgcagtaaagccccaccatggttaccagattggccagccccagcttcaccccgggcgctcccagatataccggcaccaatgactccacgtatccaagcaccagcgccagcgctgtcagaattccaaaaagggccgcattttgggctgaagttctgcgtgactgttttgtaccccggcctttactcaccgctgcagctgattttttatatgattctgtaaccgtctttttctgattcggcatgtgatcctccagtcttcatcgcggcatttcatccttttcctgtgctctgtcctcagcacgcatatagtataccatgcataacccaaatcttccatagcgccttagagtatgtacggcggccatatgacctgcttccgtgtgtaaccgtggacaggaatgaattaccacctgtgcctgtgtgaaaacgtattgtatgcaatggcttattgtgataaaataaacaatatatcccaccccagcgccgtccgcgtatattccgctccggcgcatactactatatttttaaaggagtgttttccatgaagagaagtaccatcagctccaacgccagaagtttgattggcattgcagtcatggcagtgttgtccttagcggtaattgccgtatcagaccctttgtataaggccctaagaggacccgtgaccacggccagccccgaggcgcccctggccgacgggatctatacccatgaagctttggaaccagacgcaaacggctttcgggacagaaccaccctgaccgtatccgacggtatcatcgtatcctgtgtctgggattcctttaacagtgacggagaaagcaaacagaagctttccatggaaggccaatatatcatgacagagggcgggcctctgtggaaagcccagtccgacagcgtatgccggtacctgatagaacaccagcgcctggccgggctggccgatgacgacggatacaccaccgatgccgtggcctcagtcagcatcaacgtatatccatttatgaacggagtggaggaatgcctgcgtcaggctgaaatcaaatgaacatattacagaaacgggacgtgattctggctgctgccatactactgctggcagcggtcgcctttggcatcagccactatatccgccgcacaccggctgccattgcccaggtgtctgtggacggaaccgtagtggaaacactggatctcagcaaggatacggagataacagttacatcctctaacggcggcaccaaccacctgatagtaaaggacggtgaaatctggtgcagcgaggccagctgccctgataaggtatgtgtccaccaggggaaaaaacatttaaacagcgacactattgtgtgccttcccaatcagatgattgtaaccataacaggcggggaataaatcccccgcctgttctatttatttcttccttctatgccctaaactatgtcctaaaacttcttagccctgcccactccggccagggctgtcctgatatcctcaaagctcattccgcccacggaatcaatggtggcaaccacggcgccctccaccagaggacaatccaccatctccaccttctttccctcgaacatctcaatgaccatctccgtggtcatgacagcgcttcccaaatccaccaggacaaggaccccgtcatcggaatagacagactcaatggctgcctgtatcttctcaaagctggttccaaaaccgccgccgtccatgcctccggccggcgcgatcctggcgttgggcgccatgatggaagtcagctccaccacactttttgccagattctcactgtgggacacaatcacaaatcctaccatatgtactactgctcctttcagccggacaccgatgctctatgcccgattttgtatccggtaccggtttccggtatctgtctctataccagtctctataccagtctctataccagccccgcaatgacttccagcatataggaataagaggtggctcccggatcctgatgccccagtcccctctctcccacataactggcccggcctttggtagctaccagatctttggtgtgctctgcgccggcccaggctgccctgactccggcctccagcgcttcccgtacgctctttccctctgccgccgcgtccttcatggttttcagggaagagaccatggcatccagcatggtggcttcctccacagtggcctttcctctctgctccactgcctgtacagccgtatccatcatagacaggaaatcatccatatccatctcttcctttcctgccagggccgtgcctgccttcatataggccgaaccatacagggggccggaagcgcctcccacagtggataccaatgtcatgcccactgttttcagaatggtccctatatcctttccctccaggtcaggaagctttccctccaccgctgcaaatccccgcgccatattaatgccatggtcgctgtctccaatcggctggtccagctctgtgagatactccttctcggcctccatcttcagaccgattgccctgatgatttccaatacttttttactgtctgccatgatgacccacctttcatttcaatttatttttatgacctcagaaatgcctgttacttccaggccggtgtatccgccggggcatccaaaagctccttcagctggtcatccagcctcagcagcgagatggagaaaccctgcatctcaatggaagtcatgtactctcccacaaaggtcttataaaccctgattcccttttcagccagaacatccgagaccctgttattgatgataaagagctccatgagaggtgttgagcctgctccgttgagcatcacagccacctcgcggccctcatagtcaatgtctcccagaatctgtgccagaagcatatccgccacctggtccgctgtcttcatggactccctgtgggttcccggctctccatggatcccgattcccacttccatctcatcatctgacagctcgaatcccggctttcctgccgcgggaaccgtacacggcgcaatggctgcacccatggtccgcacgttgtcgattaccttctgcgccaccgcatggacctcgtccagggaagcccctgtctccgccatggcgcctgcgattttatgtacaaacacggttccggccacacctctgcgtcccactgtgtacagactgtcctttaccgccacatcgtcattggtcaccacatacttcacggtgatgccttccatctcagccatctcagcggccatctcaaaattcatcacgtcgccggtgtagttcttgaccaccataagcacgcctgcatccgtggcaatggccttgattccctcataaatctggtccggggtaggcgatgtaaacactgcgccggccacagccgcgtccagcatgccgcatcccacgtatccgccgtgagccggttcgtgcccgcttcctcctccgctgatcagggccacctttccttctttcttattggctctgaccaccacattgccgcagtccagttttctcagataacccggataggccttaaccataccctgtatcatctgatcctctaccagcgccacatcgttgataaatttcttcatattgcgtaaacccccttttatttaataggctgcaccaaatgcgggcagcggtttccccactggttcctaaaccacgtaaagcaggggccgccatttggagcgccggacggattcatacccgtctgcgcgcccctcctgtaagcctctgctttccgttctttctgttactcgcccagacagttcatgtcgttgaggccgcaggttttgtcctcttcctcctcgacacagttcatgtcgttaagtccgcaggtcttgtcctcttccccttccagacagttcatgtcattgagtccgcaggtcttatcctcttcctcggtaattccgttcatgttattgatgtccagtttcttctccatttaaagccctccttcttcttcggacagcgccctattctgccggtacgccatccatcaaactacagtaagccggcggccgccatatggcagctgccgaccgaccggcgtgcccctgctgattcaaacggaaccatattcctgtcccgcctccggcaggagcacacaactatagcacttccttggtggccactatatcaactcccgtaccggccacgtctgccacgaccacatctccgatgcggatgggagccttgacggttacgccctttaaggcctttacacactggaatatcttatccttgggtatatcttccctggtcttgacagataccatgtcagcccgtccgccttccacccttacagtggaggtgacgattcgggtcggattcgttacttccttgcgcgcgtatgtctcgcccttcttgcatgtgtaccctgtgatggtcttgatttccccgttttccagttcaacggtcagaggacaccccataggacaaccgatacagataagttctctcttttccatggtctatgcctcctctacctttattgtaatcttcttaagaccgggatgcaacatcaatttttccttctggagctttatctcctccatctctccgggcgccataaccggacgtttcctgtgcataacctgctcatcatcaaagtatacgccgatatagcagtttttataaacattccccacacggaaacgcacgatttgggtttcctccatgcggtccggatggatggtgcagggcaccgtatagcgcaccccgtccactgcgcttaactctatctcctgtcctgtcccggagcacctgccgtccttcacatatctggccgcgttcttacctgccgccgctgcctcctctgacacaaaatccaccaaatcatggacgtggagcacgttgccgcaggcaaatacgccttcgatattggtttccaggctttcgttcaccaccggacctgatgtgacgcggttcattttcacgcccattccgttagacaattcattctcaggtatcagtcccacggagagaagcagggtgtcacaggtataatcctcctcagttcccggtatcggcttacccttctcatccacggctgccagggtgattccctccagccgctcctttccccgtatgtcaaccacggtatggctcagcttcagcggaatgccgtaatcgtccagacactgtacgatattacgtttcagtcctccggaataaggcatcagctccgccaccaccttcaccctggcgccctccagggtcatacgcctggccattataaggccgatgtctccggatcccaggataaccacttcccgtccgggcataaagccctccatgttcaccagacgctgggccgtgcctgcgcagtaaatgccagcgggccggtagcccggtatgttcagcgcccccctggagcgctccctgcatcccatggccagtataaccgccctggcctgtatctcaaacagcccctcttccctgttcatggccgtgaccaccttgtcatggctgatatccatgaccatggtgtttagcttatattcaatcttcctctcatacacctgttcctcaaacctggcagcgtactccgggcctgtcagctcctccttgaatgtatggaggccgaatccattgtggatgcactggtttaatatgcctcccagttccttatcgcgttccaggatcaggatactctctatcccgttatccctggccgctacagctgcagcgagacccgcaggaccgccgccgattatgacaatatcatattccctcatcttgcgcgcgcccctttctatattctgtccttgttggttcccactacaagctttgaatccccgccggcctttgtaatctccgtcatgggaagtcccagctcgcggtgaagcagttccatggatctgggcgtgcagaaccctgcctggcagcggcccattcccgccctggtcctgcgcttgatgccgtccagggaacgcgcccccaggggcctgtggatggcgtccaggatttctccctctgtgaccatctcgcagcggcagatgatatttccgtaagcaggattctgtctgatcagctctgcctgctcctcttttgtaagtgtatccgggtccagaattcccttgcggctgccgtcaaactgcggatttggctccagtcccagcttttccttaaggattccggccaccatccttccaatggcaggacagctggtaaggccgggcgactcgattcccgcgcagtctacaaatccgggcgcgtcctccagctcttttataataaactcatggtgatcctcatgggccctgagtccggcaaaggatgtgataacctggcgcatgggaaggtcttttacgttcatccctgcttttgcaatcagttcatccagaccttccctggtggtggctgtggcctctttgtcctcaatgtcaatggctgtgggccccacaatcaggttgccatgtactgtaggcgataccaggacgccctttccatactttcccggaagggcgaatatggtatggctcacatgatttcctgcgctcttatctaacaggcagtaatctccccttctgggggttatgtgtatctttgttccgctgaccatgttgtggaacttatcggcatggactcctgccgcgttaaccacacagcgggtctcatacacaccctggtttgtttccagagcccatccgccctctatcctgcggatatctgtcacctcagtattaaatttaaagtccacgccgttggtataggcattttccgccagcgcaatgttcagattaaagggacatacgatgcctgccgtaggtgcatagagaacgcctgccgcctcatctgccagattgggctccatttccttgattctcgccttatccgtgatgatttccaaatcctttacaccgttcttaactccccgctcatacagagctctcagatccggcagagactcctcgtccagacataccacaaaggatccgcagggattaaagggaaaatccagctcctttgccagttcaggcatgatctggtttccttccacattcagcctggccatcagcgagccttcggccgcgtcatatccggcatggacaatggcactgttggccttggacgtgccgcagcacacatcctcctcccgttccaggacacaggcattcaccttataccgcgacagctccctggcagatgcagcgccggacacgccggccccgattattattacgtcatacatatgttttgttcccttccttctttttttatgaaaatgccagttcctcccggcatcttcctgccgccgccctcaccgggccggccttttatcttaaatccgccggcctggtttaaaacagccagccgggcggccaacattcagccccgaagggttaaaaaagcggagcaaacaaggcgtgtttccacacccatttgctccgctctgttctcacgcaatcaatattcagttcatactaaacattacatccacggaattgcctgatacagtaacgctgccactactgcacccacaaccggcccgatgatgacaaccggtgcatagccccagttggaatcgcctttgcccttaatcggcaggacagcatgtgcaagacgtggtcccaggtcacgtgccggattgatggcataaccggtcagaccgcccagagacataccaatggatacgataattccaaatacaagcagtttatccacgcctggtgcaatgccggatacctggccgatgcctttgattgcaaatacaagcacgaatgttcccactgcctcgcttaaaatgttgcgtcccatgttaggaacggatggtcctgtacagaaggttcccagcttggttgccgctgactcggttgcgtcatactggtccttaaacagaaggtatacaatgacagcgcccacaaaagcaccagcaaactgtgccacaatgtatccgggaacaagtccccatgacatacttccatccactgccagggcaatggtcagcgccggattaaaatgcgcgccggatgcagcgccgaagatgaacgcgggcagcataaccgcaaggccccatgcaaaggtaatctggatggaaccagcccccttcatgcctgatttgttgagcgtcacgtttgctacaacgccgtcacctaagatgatcagtatcatggtccccaaaaactctgcaatatatggtaacatataataacccccttatctgtatggcatggctccggcccctgtgccaaggggcgccggaggccgggcagccatgctgaatcacattgtttcatacccatatctgattaatcttcttttgcccatccgtaagagcatttcacggccttgttccagccggtcaccatctctgtcctcttctcctctgaaatctccggagtaaaggtgcggtcaatggcccagttcttgataacctcttccttgtttgcccagtatccaactgccagacctgccagataggcggcgcccatggcagtggtctccacgcactgcggacggttcaccggagcattgataatgtctgcctgggtctgcatcagatagttgtttgcgcttgctccgccgtccaccttaagggctgccagctcaatgccggaatccgccttcatggcctggagcacgtcgttggtctgatagcacagtgaatccagcgtagcccggataatgtgatacttgttgacgccgcgggtgatgcccacaatcgtgcctctggcgtactggtcccagtggggggcgcccagtcctgtaaaggcgggaaccacataacagccgttggtgtcctttaccttcttggccatatactcggaatcaggcgaggaatctataatcctcatctcgtccctcagccactggatggcggcgccggcaacgaagatggaaccttccagagcataattcactttgccgtccaggccccaggcaatggtggtaaccaggccgttcttggagaataccggcttctcacctgtgttcatcagcataaagcagccggttccgtatgtattctttgcctcgcccgcattgaaacaggtctggccgaaaagcgctgcctgctggtcgcctgccgccccgccaatggggattgggccgccaaagaactgcggatcggattcaccgtatacgaaactggatggttttgcttccggaagcatgcacttcggaatgtttaactcggccagaatctcatcatcccactctaatgtattgatgttgaacagcatggtgcgtgatgcgttggaataatcggttacatgtactcttcccttggtcagcttccagatcagccatgtctccacggttccgaacagcagctcccctttttctgcgcgttccctgactccttccacattctcaagtatccatctcagctttgttcctgagaaataagcgtcaatcacaagtcctgtcttggcacggaaggtatcgaccaatcctttctccttcagtgtatcgcagtactcggaggtcctgcggcattgccacacgattgcatggtatacgggctccccagtctccttatcccatacaatggtagtctcacgctggttggtgatgccgatggccgcgatatcctctgcggttgccccgattttggacatagcctccactgcaacgcctaactgtgtggaccagatttcattggcatcatgctctacccaacctggcttcgggaagtactgggtaaattccttctgagcaacactgcacatttcccccttttcattgaacaggatacacctgttgcttgtcgtacccgaatccagtgccattacatactttgccataaaaaaccctccttcttgttgttctgatacataccatatgtatcatttatacataaacccattctccttccccaggagagcggacttaagtttctaatttcacatcagccatactttctgattcgttgtggatacggatatggccccggctgacagggcggccatcacgtcctccttgtctgatataagtccccccgctatgacaggcaccttcaccagtctgcacaccctgcgtatcaccttgggcatgagtcccggcagtatctctatgatgtcgggcctggccacgctcatctgtttctcgatgttttcaaaagccatggaatccaatacaaagacccgcagcgtggtatacagggacagctctctggcccgttttatcagggccggctttgttgagatgattccgtccgcactggtattattcctgatgaaatctacagcaacctccttgctgctgagtcctgttatcaggtcaatatgtaccatggccactttgtctgacgctttaatctgttcgacgatggtgctgatattgcagatatccccaaaaaggatgaacaccaccttaatctcatctctctggcagcaggcgtcaagaccctccatgtccttcaccgctgctatgaccggattggcttcaatcaggtcatataatttctggttcatcggtatcccccctcacataatttcaccactaaaaagagcatagttctaaatcaacatttctgtcgtttcactatgctctcatcatctcagcaactttattcgtctgtctttatctgttttcaatatagcacattgcacatataaattcaatagaggattttcttttctcacataatgtacaattttttatcaatttgagcacttttttcattagtatttaacaagtttttaatggagttttaccattttttagttattattttaacaaagtgacgatttcgtctatggtcttgcttcccatcacaatcctgctgtcatttagaatcatcataggcacccgcttaatatcatattgggctaccaggtcctcataaagggccgcgtcaatcatttcagcctcaatattcggattcaggaacgcaatctgctggcaggctgtcactaccaaaggacagtgatggcaggcaagggacacgcagatcttgatatttgtcttcttgtccagccgttggattttctttctggtacccttcgccacctcctgtcccggccctgccaggttatagacagccagcacaaaggagttgatttccctgcctcccggcaccccgtgaaacgcagcccgtccgtaggccccgtccttatacagtcctgttacgggcagccacgccgtattcagttccggcacctggtccgcctcatccggtccgtataactccagctcaaggttaggacttacagagacgactgccctgagaaaggaggccatctcccggtccttttccccggacagatccaccactgccctgattgtcactcttttctccattctgccgaagataccagccagctgcgtcttaagcccctggtccaccagactgctttcttcgggaatcgtatttaaatcaatcgtaacatccacctccctacagcattcccaccaaatccaggctgggtgtcagcgtctcttctcccggtttccactttgcaggacatacctgatctccatgttcctccacaaaccgggcagcctgaaccttgcgcagcagctcctgggcgttccggccgattcccatgtcatgaatctcatacgccttaatcttaccttccggattcaggataaaggttccccgaaatgcctggccggcttcctcatccagcacgccgaactccctggccagcttcccggccgggtctcccagcatgggatactgtatttttttgatggtatccgaggcatccgcccatgccttatggacaaaatgggtatcctccgacaccgagtaaatctcacacccggcttccttgaattcctcataaaaatcagccaggtcccctaactccgtgggacacacaaaggtaaaatcagccgggtagaaaaaaaatacagaccagtgccccagggtgtcctccctggtcacatccatgaacttcccctgataaaacgcctgtaccttaaattccccgatggtcctgttaatcagattccccataaaaatgctcctttctccaattgttgagacaacaactccggtttatccgtaaatatactgacttttctgagtatcagtttgattgtagcacaagtttttggagaggacaaggggggtgtcagcgcccccttcgcatctgccgcaccagcttctttgtttctttgtccacgcggaaggactctgtgattttctggagcgctttattgtaggtccagtcgtccaggctgctctgcttcagatattccattacctggtccgggaatttgacgaaatagacggagacagcccaggccacggccattttggcatagtaacccggatgacggacgcggtccagcagttttagggcgcggtccagatagtcctggtctgtgtaatgggataacagcatgacggttccgaaacgcaggtcgtattccctgccggattggaaataaggctggatgaactgccagacctcttccctgtaacggccggtgattttaagggagccgcagaatatatcgcacactgcccagttattgatggccgggacaaaggcggttacgtattccccggccgtgtcccagtcacggcagcctccgcagatacacagcccccagattatcatttcgtcgtagagaacgccgtctgctccctggcccttttccttccaggcacacgatacctcttttatgtactcctgccatccgctttttttcaggtctttcgcgataccacggagttccggcgtgcgcactcccatgatgccggtgattcccggcagaagccggctgtggaattcccggtattccgggtctgacagctcttccagtttttttcttacggtttcacgtatggttggtttatctggcatattaatctcctggtttaaatgatactggtttgctggctcagagcgtgtctgagcagttcctgccgacacgctttagagcagaaattcactgagtacaaagttgcttacatccattccccactcggtcagggatatccagacaccctcgcgctttaaaagtccgtccccaatgagacgctctattacaggcccgtatacgccttctattttgaccccgaacatggatacgaagtctatctctgatatgccctttgtcatgcgaagccccaggaacatgaattcctccatctgggcttccctggtcagctcctccacagggcctctgagaagggcaagggctgaggatccgccttcttcggaaaaatccaggtgcagataggtgtccaaatcccgttcattggaaaaacgtgttccgtttatgcaggaggatgctcccagacccaggcccagataaggtacttccctccagtaaccggtgttgtgcaggcactccctgccgggcttggcgtaattggatatctcgtaacggccatacccctgctcagccagaaaggtcctggtaaaatgatagatgcggttctctgtgtcctcgtccggaagggcgggataaagggccgctctttttctgggaagaggagcctgctctgtttggccgccgccccgcgggtgcagaaaacagacatcatctgttttaaggccggtctcctccccttccctctttccgtaacgttcccagaagggtgttccctcctccacaataaggctgtatgcggatatgtgctccggtttcagcatggtcaccttcttaagggtattcttccagctctccagtgtctggcccggaatgctgctcatcaggtccacattcacgttggtgaatccggccatgcgggcgcactggtagcttttcaggaattcctcaaaggtatggattctccccaggtccttaagttcctggttgtccgcggactgaaggccgatgctcagccggttgattcccgccgcacggtagatgtgaagcttgttctgaagcagggtgccgggattgacctctatggtaatctccgcatctcccgctatgtcaaaattccggtttaaagcctgcatgatatccctgataagatatggttccataacagaaggagtgcctcctcctatgaacacggtcttaacctggtattcacggcagcaggcaccctggacttctatttcccggatcagttgttcggtataagcctcatggacagacgccagcgccctgaaggacaggaaatcgcagtaaagacatttcctggcgcaaaagggcacatggatgtacagctccaggggctttctctgtaagtttgtcatcttatgatttatcccacctatttattcgtcatccagcttcagcacactcataaatgccttctgcggaatctctacatttccaatctggcgcatacgtttcttgccctccttctgcttctcaaggagttttctcttacggctgatatcaccgccgtagcacttggccagcacgtccttgcgcacagccttcaccgtttccctggcaatgatcttgccgccgatagctgcctgaatcggtatctcaaacagatgtcttggaatctcatccttcagcttctcgcacatctttcttccccgttcataggcggaatccgcatgtacaataaaggacagggcatccacctcttcacggttcaccaggatgtccagcttcaccaggctggaacgctcatacccctttaactcatagtcaaaggaagcgtatcccctggagcgggacttaagggcatcgaagaaatcatagatgatttcatttaagggaagctcatatttcagaagggcgcgggtcgtttcgatatattccatacccaggtaattgcccctgcgctcctggcagagcgtcataattgaacctacgaattccgtggttaccatgatttccgcactgacaatcggctcctccatgtactcgatttccgtaggatcaggaaggttggacggattggtcagctccatcatctcgcccgtggttttatgcacccggtacacaacgcccggggccgttgtcaccaggtccaggttgtattcacgttccagacgttcttctatgatttccaggtgcagtagtcccagaaaaccgcagcggaatccaaagcccagggcaatggatgtctccggctcgtagaacagggaggcatcgttgagctgcagcttctccagtgcatcccttaagtcattgtacttggcgccatccgccggataaagaccgcagtataccatgggagtgacctttttataaccgggaaggggagatgcgcaggggttgtccctggaagtcaccgtatcgcccacacgggtatcccgcacattcttgatgctggccgtgatatagcctaccataccggctcgcagctcctcgcagggaatgaactggcctgcgccgaaataccccacctccaccacatcctcctcggatccggtggccatcatacggatgggggtccctctttttacggtaccctccatgatacggcagaatataataactcccttgtaggaatcgtaggtggaatcaaagataagggcctttaaaggcgcctgcggatctcccttgggagcaggtatcttgtggactatggcttccagcacttcttctatattaacgcctgtttttgctgaaatatggggggcgtcgctggcatccaggccaatgacgtcctcgatttccgctgccacccgctccggctccgcgctgggtaggtcgattttattgataaccggaaacacatccaggtcatgatccagggccaggtatacgttggccagggtctgggcctcgattccctgggaggcgtccaccaccagtatggcgccgtcgcaggcagccaggcttcgtgatacctcgtagttaaaatccacatgtcccggcgtgtctatcaggttgaaaatgtactcgtttccatcctgggccttgtatacggtacggactgcctgggacttgatggtgattcccctctcccgttccaggtccatattatccagtacctgctcctgcatctcacggctggtgagaagtcctgttttctcaataatacggtcagccagggtggacttgccgtggtcaatgtgtgctataatgcaaaaattgcgaattttactctggtcaactgttggcatgctttatcctctttctgtggtatttcttcaccggaaacttgcgtacatccatatggaaaacgcttccgttcgcttactgaattatactatcttttctatttccttgcaacaccatatccaaaagttctgacaggggctccatggcgtttaacgcctcctcatacgtgtttgtctgggcccccacctcgatcaggctggacttggggcgcaggtgttcattgtaccggaggcccttaaggtatatcttgcgggtaaagccgggataataggcggcggctcccagctgcatctggaggctgaatgccaggttatcctcccggtacggattctgcaggtactcaatggggccctccggtgtctggctcagcccgttaaagaacataatctgcgccgtatccctgccgtccacctgggtgaccagatgcaggttctcccccaccccgtccctgtggatatctaacaccacctcgatggaaggattctgctgcagtatgttggtgattccgtccagggcataattataagccttgctccggtccagctggccgtttttcaagtcataaaccgatgtgtcgtggtatacattgtaacccttggcttccagaagccgggtcaggtaatcccccacgcccaccacggtctgtcccgggccggaatccttataggcttcctgggaatgggtgtggtagataagtatctggggcttggaatcatcccccttcatggtcatgtcacggctcagcagatccttggcattcatcaggtcacggcccgccgtggtggaggtgtggacactgtaaaaatgttttataaggaaatcgtaatccatcagctgttccaacacatatgtattgccggtaatggggcgctccagtgtccccgttatggtctccagggactggtttggcccctggtatccggatgccgtacctcccgcgccggctgccaggtcctggctgctttctgttttggcgccacccgcaccgccagctcctccgccccggacagtttcccctccctgagcagttcctcctgcgcccgcagcggcttcccctgaagccaggactcccggttcctccagtgtctgctggccggattcctcattgccgtaccaggcaagatactggtgttcttcataaaatgttttaaccgcgttgtatttacggtaagcaggatccgggtcattgatagacccggtgcttccccaggcatccggccatgagcctgacatcccggcattttctgcgggatgggcctggttccatatggcttccaccagccattgaccgcctgcgcatatcatatctctgtaatcactctttgttatgcttccggcggcccggctgatataccggccgcacaggagcataagcagtataaggaccgtgccggtcagaaaccggcgcatgagccggtccacgcctccacgtcttattctcatcaattcattcacctgtcatcatactattattatgatatgcaggaacgcggaggatattgcttgtttcgtaaccttacggaaaaacagcctgatggatgccctcggatatggtaaagcttaactgcttcacggactggtcaatgtccggaggagtgacataaagaggaccgaattccggctccagtaactcccgtataagctggtactgtccgtccgggtccatttcctcgatccagctcccggttcccctggtaccctcattttccgccagcacccccacaagggcggagacggtatcgtgaacaatggccgccgcccccaccacggtgggaaccccaatggccatcaccggcactcccaagctttcctttgtcaggctgtggcggtgatttccaaccccggagcccgggtggattcccgtatccgtaagctggattgtggttcccagacgccgcacgctcctggctgccagggcgtcaatggcaattatcaggtcaggatgggtttcatgtatgattccctttaaaatctctgccgtctccatgccggtctgcgccatgactccgggcgctatgccgctgatagcaggaagtttcctgtctttcaggaaggtgtttccgtactgtccgtccagatgccttgttacctgcaggttatccagtacccggggacccagggaatccggggtgacggaatcatttcccagccctaccaccaggaccgagggcaaatcctcctccctgtacccaatcatctccgccataagcctgcgtatctgatgcgccagttcttccgatatctcactgtggtaatcgtcatccgccttggacagccggtctgcctccagagtaaggtaggtacctctgggctttcccattgatttggctccctgttcattcagtatttttacctctgtcagttttaagccgctcttttggtgatgccattccttcagccggactccggatacgtctcctccttcgcccatggaactctcacgctgctccagcgccagatccgttctcacctggaatgtaccggccgcagcctcattgacagcgtttacagctgcattttcctccatattcatccacctcacatatcattctcccatcagtttctgcgattatggccggaaatatgtatgattggatttgaaagagtctgttttcgattggggatatgattgcagcagaaaaatcccatgtcaaatgtcatgtcaaatttcttcaaaaattcgccaaatatgacttgacattccgggtcagattagctagaatacaatagtatgtttacattgaactgtccgtgtccaggctttgatggaaaacacaaagattataatatgaagaacggaggtgtatttcattggctaacattaaatctgcaaagaagagaatcttagtaaacgaaactaaggctgcaagaaacaaggcgatcagatccaaggttaaaactgcaatcaagaaggttgacgctgctgttgctgctggggacaaggctgctgcccaggctgcactgctggctgctaccactgagattgacaaggctgctaccaagggagtatatcacaagaataatgcttcccgcaaggtatcccgcttatccaaggctgttaattccatcgcttaatttatagagatattcattgttaaggaatttcagacactcttccttccggcccaacccaccgggaggatttttttgctttaaatgcagctctgactccccattttatacagtgcataaaatgaggattccggcccatactatcatcgaggtgatagatatggcatcctatgtttccccgaaaattcgggacaaatttgaaaccctttccgttgacttaaaaaactgcattctggagcgcaatgtacacctggaaacattgcaggacctgattaaggttctggatgaaatcgtgaaagagggaagctgacagcatccaaaggaggcagaatcatgaatcgtaccatgaatgaggatacagcggaaaacagggactgttccaacgatacggaccatgtgaagaaggacaagggcgcttatgcagagcccctgccggaatctttcaggccgcgccgtgacggccctggcggagagtaaggctttaagagggaaaaatcccagacagataagcggctgcctgctttggctgcctgcgtttcctgcctgggatttttcacattttattccggataccggttttacatattggcacaaaccaattatttcacatacttaatataggtcagagctgcttccagacatccttccacgcctgccagtccgctgttgaggcagatatcatatgcatccatatcaccccactgggtggtggaataatattcatgatatgccttgcgcctcttgtccactgccaggatgctggccttggcctcctctctggtgagtccgggattcagggacatgatacggttaatacggttttccatatctgagaatacaaagatattaacagcgtccggaagtatggcatctgcacagcgccccacaataacgcacggccccttgtcgttcaggttgcggatgacggttgcctgggccgcataaatgcgctgggtcatggcaatctggtagtccggtggaacctgccgcggtgaataattatcaaaatccgggtccacctcatcgttggcctctaatacggaagtctcaatatttccttctttcgcaatcatggctatcaattccttatcataaaaaggaattcccaatctccgagccagtttttcgccaatctcccgtcctccgctgccgtactcgcggctgattgtaattgctctgttcataaccatacctcctcatatcccattttcatattctatgtcagtaaccggctgcggtccttacatattctcctcgtcgtagcgggctctgataccgccgataaacttaggtctggtcctggcgcataccacatgggcgcttcctatctcttttgtctttatccgcacagggactgccacgtccttcatatgcatgccgatgagggtatccccgatatcaattcccgcatgggccttgatgtgctccactgccacggggtgttccagggtggcatacgcagccgtggcaaaagaacctccggcctttagctggggaaccacattcaccggttcatagccgtaagcctgagctgcctctgcctccagaatcagggcacggtttaaatgttcgcagcactgggcagccagatagattccctttggctttagttcctggtaaagagccgtatacacagccatccctatctccgcgcttgagtgggatccaatcttgaagctgtctatctcgctggatgaacagcccaccaccagaatctgtcccggcttcagacgggccgcctccataagctcctccagcacctgcctggcctgagcctttaaatcttccagttcaattgtctccatcatatccatcgccttcattcctcttttttttattcatatttgtttgctatgagcagttccaccgccagccggtcctgcagctttccggtcttaacgccttcctctgcatccacacagagattcacataggacaggatctgttccctggtaaatgtcttggcctgcagcatgatttttcccaccacaaagggctgaagcttaagcctggacgctatggtgcttttatccatcccctttcccatcaggtccttgacctgaaggatttgattaaactgccttgctatcagaaaaaggatgcgcatgggcggttccttcagtgtcagaagatcctcatagaggtccatggccttgcgggtctggcgtgccgctatggctgttatcatgtcaaatattttattggttacctgggtggtgcagatggtctccacgtcctcatccgtaatcacctcgcggcccagagtatagcttataagcttttccagctccgagctgatgttctccatgtcatccccagccttgctcagaaagaattccatggtgcggccggtaatcttcctgccgtttttagacaggatgcctgccgcccatctggcaagctgggccggttcctgatggctcagttccgccgcatagccgtatttcttcactgccttatatagtctgctcctcttgtccacttccgattccacaaaaacaagacaggtggattcagggattcctcccatatactccgtcagctcgtccgctcctgccccgcctttaaagaatccgctgtcctccatcagtataaggcgcttctccgcaaaaaaaggcatggtgtccgcaaggccgataatttcgtttacattcatccctttgccttcaaaataattataattcatggtatccccgtcggtaagggcttctctcagacggctcttataacttttctttaagaaggcctcttcaccgaacagaaggtatacaggcttaaatgtacggtcttttatgtcctgattcaatgtctgcatgtaaaggtcgtccttccatatcccgtcaattggctgatgttttccaatttcagtataacacagggcaaggtgatttgtcactagagcatgtttgaaaagtgctgcttaagtgtctgaaaagcgctgcccaagtgtttgaaacgtcctgattaaggttcaaagtttccttgttcatctcccggatttatagtagactgtaatcatggaacatatatatggtgtaaggaatcatgttcatgcaaaaaacaggaggcaagaggaaaccatgggggaacaaaacttactactgaaaaggaagcttgtcattcagtccttcctgccgctgttcatttttatttttatcagatactttgattacaggatgatatcatccatatgccatttcatccgtgaattgatgcagaggaatttcagtgtcatgaaccggatatgggaccatccataccttggtccatttatcgctgcattcatttcactggcatgctccctttacggcataaccgccatgtggcagtttaagagcatgcagatgtccggatttgtggatgcaggcgaagaaatcgtgattgaagaagagataacggattccggaatcacatttttcatgacctttgtgctgcctcttttgctggacgatgtggaaaccttaaggggcttcatcatttttaccggtattttagggctggtcatccgtttgatgtggaccacccatttatattatcaaaaccccatattgactctgttgggctacaggatatataaattccgcttcctcaatcctgtcatggacggctgccgggataaaaccatgattgcagtgtgcagaacaggcattgcagagaaaaaaatagtgaaatggaagtatatatcggatgatgtctgcctgatgtacaataaaaactgaaacagcggagaaacatacaatggaaaacaaaagagaacacagcacgaaccatgctaccccaaaaacgccaaaggaaataattgtaaattcattaacagaactgtttgcggatgatgaatttgggtttgatatgtttatcatgatgaaaaccggggagccccccatgaagcatttcgctttttatgagggacccactggcagggaacatgattttaagctcaaagtccaaaactccatcgtcaagagtatcagagatctgtttcttgatgaggaggctgaatatgcaatggcggaacaggcagggggcaatcagaatattttttacatcataaaacagaatgacgattataagccgtttgaacttctgaataccccggaaaagcaaatgggtcctttcttcatggatgacagggacaaggccgatgcaatactcttccgcttcagaaggggcgttcacagcatctgggcttaccagtatatacttcccgccaccattcccaataagaaaaaccagcacttttttgcccggatattagatacggaacagactgattgttttgtggaaatgccggaacagctctttgtaatcacaagaaaagtagatctgctcgtcatggatgacaaaatcatcaccaaagatataggcctgatgcaaagacatttcgggttcaatgacttcatcaaggcatcagccaaaaaagcggtgtctgatatttcagatatccgtctggtgactaattgtgaaaaattaacggcatatatcgagcggaaccagactaaatattcccgcaagatgatgcggattaaacactaccatgtggtggaaaagacagcggaggaactgatacagataatcaatacagtcccccgctggcagggagtatttgatatccgtgacggacagatttatctgaggacctttagggatgtggaaaacctgattgatttattcgatgaaagatatacggtttcgctggtgacgggggatgaatttgatacggatgtaaaaaggctggctgctccgggaggaatgggaggggaggattaaaacacatgaaaatatgcatggaaacattccggcagcctttgagatatgtgttttggaaataacctatgggagatacgaaaaaacactggaaaatcatgattgacagacgaactgaaattggcttataataaaggtacaaaaaaggcagttcactccagtgagtggcttccaaaatattttatgtatctataaaaatagtcacatttgctttgggaggcgagtgactatttttttgtacctataatcataacgataagtaccccaaacgctatcattagagaacgtgtcccgactgccacggcaacatgctccggggcattccaatagggttgaatagttgaatatatgaaaggaaaaatgcaagagaaacactggaaaatcatgattgacagacgaaccaaaaatgacttataataaaggtacaaaaaaggcagttcactccagcgagtggcttccaaaaagttatgtttctacaaaaatagtcacatttgctttggatggcgggtgactatttttttgtacctataatcataacaacaagtactccaaacgctatcattaaagaaagtgcctcatatgtactcatgttataccacctcctttcggagatggaagtcacccagcagtaggaactgcctgtactaattatacaaaaaagcaatgtcactgcatagggcataattaaaaagaggcgcttgtataccttataaaattatagtaaactctatatacaaaatataaatggagatttgacgaatgactaaccgcaatcatactacctaacatccttttcatctgccacggcaatatgctccggggcattccgataggattgaatgtatatgaaaagaaaaatgcaagaaaaacactgagaaatcatgattgacagataaactaaaattggtttataataaaggtacaaaaaaggcagttcactccagtgagtggcttccaagttaatagcttaattaaaaatagtcactaagcttggtaggcgggtgactatttttttgtacctataatcataacaacaagtaccccaaaggaaattcatgccgatgcagtaaagtattataatcggctctgcaaaaacatgagattacgtgttatgagcaactatataaaaccgatcaatacatttattagaactactaaaacatttgaaaatcgtgagaattttggctttgtcgtcatgggtattaattgtatccttgttgaattatattttgaattaatcaatgggtatgatgagtcaagcgatgacggaaatcatatcgtagatgcatataaaacagttttgccacaattagattctgagatttctactgctgatgctcaaaagttctacaaagggattcgttgtggaataattcatcaaggttaaacaaaggagaatactgccattacatttgaataggattgtattgtggaacacaatggtgagtactatttgtgcaatccagaatcgttgtttagggaattgcagaatctatatgcatcatactggaaaaatatatccgaaaaaagttatgatgaacctcttgctcagaaaatgatttccaaatttaccaagatactcgaacatgacgacaacgtagttgaatagtcaagaacaccggtttaaccgatggcttgctttgaatagataatgctctgctaccgttataccatttgcccgtgaatttgcgtaaatttataaagaatagcgtaggtttggggcaaaatatgaaaaatgaaaaaagcgccggatagcccataatatcaaggtttgaaggcttatgaagggatataaaagatatgataaaaatacgtttcatctgcaacggctatatgctacgaagcattccaataggattgagtgtatacgaaagtaaatgcaagaaaagcgctgaaaaatcatgattgacagataaaccaaatttagtttataataaaggtacaaaaaaggcagttcactccagtgagtggcttccaaagaattttaactcaaaaaatagtcacatttgctttggagggcgggtgactatttttttgtacctataatcataacgataagtaccccaaacgcaatcattaaagaaagtgtctcatatgtactcatgttataccaccccctttcggagatggaagtcacccagcagtaggaactgcctgcttctattatataagaggtaaacgggctgtaaatagaaaattaaaaaagtaacccttgtttaaagcatgaacttatagtagactttagctatcaaaaagtaacggagatacagtaaatgacgaagcaatctaacaataatattaaaatccttttcgtctgccacggcaacatctgccgcagccccatggccctctactatttccgcagcctgctaaaggaaagaggcctgtccggtataattcaggcagattccgctgctacctccaccgaggaaatcggtaatcctgtacaccacggaacccgcgccaaattaaagcaggccggcattccctgcgaggggcaccgggcaaagcagatgacgaaggcagattacaaatcatttgattacctgattggcatggacagctggaatatccgcaacatgcagcgtattgcaggcggtgatccggaccacaaaatttttaagcttatggaatttaccggttccggaagggatgtggccgacccttggtacacgggtgacttcgacaccacctggtccgacgtcacggagggctgcgctgcgctgctggattatatatcagagcgtctttaaacattactctgccttccttactgacagcttatatggttgccccgtttgtctctatgacacggcggtaccagtgaaagctgtctttttttatgcgcttaaggctgcctgtctcatgctcgttcctgtccacatacagaaatccgtaccgctttctaaagccttcatgggaactgagcaaatccataaaggaccagggcgaataccccattagctccacgccgtcatccagcgcctgtctgcatgcctggatgtgccttctcagatagtcaattctgtaactgtcatgcacctttccattttcagtaaggatatcggctgtccccagaccattttctgttatgagaaggggaagccggtatttctgataataacggttcaacacaatccgaaggcccattggatcaatctgcgccccatactctgtcgaaaccagatgaggatttttcacatgggaaaagtatccatactggtcaaaatccacctcattgcccggaaagcaccgttcccccacaggatgaatctcatctgccggaagatatctgacacaaagtgtcctgtaatagttgacagcaatataatcagaagcgccccatttgagtatctcctcatccccatcctccgcggacggcataatattacgctctttaagataccgcctgtagtatcccggatatctgccatattgatgcatgtccagacagtattccgccttaaaccaatcattgttcgccgcagcccacacatcctccggacggggtgtttccggataggtacagcaggacgacacggccgggcctatctttcctccggaaaccagctcatggcatgcctttacggccagggcatgggccagaaacatatgataatccatctgggccctgagccggtctgcctcccatttatccgcggcatcaatattcatcctctcatccacccgcaccatcaggttctgttcattgtgaacctgccagtatttaacccggtcgccaaaagccctgaagcatatcctggcataccgttcaaaggccaggacacaccggcgtgattcccagccattgtatttttccgctaacgcgtagggcaggtcaaaatggtacagggtgacaaagggctggattccccttgacagcaggcagtcaatgattctgtcatagaatttaatcccctcctcatggacagctccatcgccatccggtatgattctggcccacgcaatggagaacctgtacattttgagcccaagctctgccatgtaatcaatgtcctccttccagtgatgatagaagtcactggccaccttagtatctgcctgtatatgggatcgtttaaaggaattgaaatctgccactgtcatcccttttcctcccagattccatcccccctcaatctgaaatgcggatgatgaagccccccacaaaaatccttccggaaattctgtcgttttctgatgcattgtttccctcctgcagttaattcctttcccatgaagtttcctctggttcctggtccatatcctcaaatcccagcagcattgtcaaaatggcagacccgaagaatgatataccaataccagccagataaaagaggaattttttcattccaaaagcagcataggttgccagtgtaaggataccgttatttgcaaaagcatccccgtacacgcctcccgcccccatgacagcccctcctgcggctccgcatataaccgcgtaaatcataggacgtttaagccgcaggttacacccatagatggcaggctctgttatgccgcagacagaggctgccactgatgccgatgccgccactgcttttagctccctgcttctggtccgcatcataacccccagggcagccccgccctgagaaaaattcgcagcccctgcaaatgcaagcaggttttgccggccgttcagtgccacatcctggattccaatgggtaccaaggctctgtgggctccaaaaataacaaacacacaccacatgcctccgatgaaaccgccgcacaaaacaggacttattcccataaggcctgtgtagataaaatgaattatatttcccagataaattcccaccggcccaaacaccataaataccgcaggcaccattaccagcagggagagccccggtaccagaataattttcagaacctccggtatcacacgctccagaaaccgctgtacataagccaggataaacacacctattataatagggatgactgatgatgtgtaattggccctggtcaatgccactcccagcatgctgatgcgttcttcccctgtcataagactgagaacagaagggtaacacatggttccccccagggccatggccacaaattcattggcctcaaacaccctggcgctggtataggccaggatgattggcataaaataaaaaatcgcatccgtggcagccagcaggattacgtaggtatggttccctgtaatatcaatgccttgattggatgccagcatcctggctatggtcaggaatcctttcaaaaggccggatgcagcaatggcaggtaccataggcgtaaacatggaggaaaccgactgaatcattctgtttcccaaatgatttcccggtgtgtttttctctctgtccttactgtccctacgataaaccttttctcttttttcacccgcttttctttctgtaccggtcatttccttcagcaggtcatatatccggcctacctttgtccccatgacaacctggaactggccgctgctttccacaaccgctatcacaccttctatccgctctatcttaccgcgctctgccttttccggatcccttaattcaaaccgaagtctggtaaaacagtgtgtcatctccctgatattctctgccccgcctatgtgagacaaaatctcgttagctgtttcttgataattcatcccctgctccttccaagattccacaatctcttccatatttataatatggctgtcagaagcgtatttcatccagctaattctgacgagatttttcctccagaaatgcatggacccgcagcgatgtgccgtctgttttaagtgttatggctcccttttttccggtttccagaaccgcaatcccctgcctcctgaaacgctccattgtctccggcgacggatgcccataagaattttcctttccataggaaaccacagctaattgaatcctcaatcggtccagaaatacccccgatgaagatgtcctggaaccatgatgggctgttttcagtatctgtacatgattcaaatgtatatcctgcagggccccctcctgttctgccagtctgaccagactgctctcctgttcttcccccatatctcctgtaaacaacatatgaaatcccttataatccccgcacaaaaccagagagtggctgttacggtccttcccgccaaaatcttcaccggcatacagacaggtaagcgtcagctccccagtttccacccagtctccggttttcatataaaccacagctgccccttctctcctggccagtgcagccagattttcatatacctcctccccctttcccatcactggcagcaccagggtacctattcttatgtcctctgactcctccagcaggtatataagaccgtttatatggtcgctgtctccatgacttaccaccgcgtaatcaatccaggatattccctggctttttaaataaggctccagcacaatattccccagttttttctggctgctgctgcctccatctatgagcaccgccctcttaccagacctgagcagcaggccgtccccttgtcccacatccagacagacaacctccagtccttttacgggacgcgggaccaaagccgcaaaactaagggcataaattccaaaaaaatacattaacatcatgggtttacaactgatggaagatatgcgtgtttgtaaatccctttctgccagataagcgttacaccttgcaggagattttgcccgaataaaggcgctccggcccctgatacaaaacagcacaactgctgttcccattccgtgtatgccaaaatacattaccagactgcccggcgacggacgccccagcaccagactgtatccgggcagcccttccgcaaatttgcacagcagctcataaaacctcaaaatataatgtccggcccccactgctgccactcctccctggagccagaagcttcccagtacaatccccagaatacccgaatacattaagatagaaacaagaggtataaccaaaagatttaaaaaaatgccgtaaagcggatgctgaaaatagtggtacagcacaatgggcgtaagtacgatttgtacgctcaagctgataagaagcgtcttttcccacgcccgctccaattcaaggaatgactgcacccatcctcccaatccgctgatcgccagaactgccccaaaggacaattcaaatccgctgtggtacagcagatagggctgtctgtacagaagaattaaggctgccgctcccaacgccgacagggtgtcgtagcttcttcctttaaccgccgccagccacaggcatactatcatgataaccgcccttatggcggagccggaactgcctgtcattattccatagctgataacaagaacagctgatatcatcccggccttgccatatccggctccggcccggcgaatcatcagatagatccctccgccgataatagccagatgctgtccgctgacagccagaagatgtgaaattccgttgcgctggtacatatcccgcatctccggattcatatcagatgtatctcccagaagcacggctttaaatacagccacatcctccggcatgcatatcttttcaagtacaccggcacattgcatccgaaactctgcgattcccttgtaataagggattgcctctcctcccgccactgccaggttctccccgtacagcctgcatgcagttccctttgttcggtaataggtcctgaaatcaaattctccgggatttcccggcccttccaccggagccagcttgcctctcacctgtactttcacccccacagccagctcttcccctaagtcagaatcatctttctccgttgtcctgttctccgcatacaccaccatcctcctgaacttcacagaccttttacctgcctcggccgtcacctcctccagcataagggtaatcgtattttccttttgttctgcctttttaattactcctcttaccagtatccgggcgccggccatggtccgggccacggactcctcatggtccagaatccctttttcctgctgtcctcttgtcattcccacagacgaaccagacagtagacataccaaaaagagcagaagcactctatgtttccggttgctcctgccctgcatcttctctcttggagcagaagggcgcagtactcccctccctgtatccaaaagccataggattcctgccgcagctgcacacagccacgccagaacacctaagtccaccgccgtcttaacctgcagggccagcacctctccaagtacgtaacctgctgccagtacaaccagcggtctcttcatattcagttaaatttcctttcgtctattcattctttccgtcaatataattctggcttctctcaaaggtggtatttaaggacaccacatcccggaacatcacatcctgggagccgttgatcataatctgcacctttgtcaccgttgtcatctctgaaagagaatccacaatggaatagatcgggatatactcattcactgccagagttgtattggcaaaggcggaatcaaagttaatatagcatacattatccgtcactgacaaactcagtatcttgcagtctggcggaagcgtgggattatgcccctcctgtcccggtcctgcaatgagctgctctactaccagctgttccagagaggtattgatgttgtggactacctcccgtttctccggcaccaggcggttgcctgtctcatcggcaaaatacagggtcagctccgtcttttcgtaggcatttacattgctggtattcatgataaaatcagtggccgacagcattcccaccggatttccctgccggtccatcagaggctggtcaccgcagtaaatattgatatagtcaattccctcaatctgcgtcagggtcctggtgagggctgcccggcagagaatctcccgttccgccttcatggctgtgtaattcatgtcgaaatacagatacagcacctgttcctcctggcggctcccctggtaggttacccggtccgtcaggccgggctggcagtccaaatcctttggcacattcaggaactggtccatcagttcattcaccaactcccccttatcctttgtttccgtctcgtactcctggggaaccagcttggtgatggacgcattcagataataaatcagatatctgccctcggcaggattggagacagggctttccccctctccgcagcccgacagcaggaatacaaccgccatcaaaggcagtatcagccttttcaccgcatgtattcccatggtatgtctgctcatgacatgtctgctcacggtatttctgctcacagtatgtctgctcgcggtatgtctgctcatggctttgcctcctgtctcggtacatagttaaggggtatcctcacgctgaaggtggttccctctcccaccgtactctccacatctatgataccatggtgcatctgaatgacatttttcgcgatagccagtcccagcccggtgccgcccacttccctggagcgggccttatccacccggaaaaaccgctcgaatatatgttccagcgcgtcctccggtatcccgataccggtgtcagccaccttgatgtagaaatatttgtgatctgcatccagggtcacgcgaaccatacctgaatcccggttgtatttgatggcattttccaccagattggtgattgccagggatatctttaccttatccacatccgctgtcacttcccggatgctctccaggatcagttccacatttccacgtttggcaatgggacgcagacgttttaaaatcagctccagttccccgttgatattcacctgctctatgttcatctggtcctcggctgtcttatccattttgaccagcatcagcaaatcctctatgatctggttctcccggtcaatctcatccgaaatatccgtcataaactcccggtacagctccaccggcacgtcttccatccccatcagggaatcagccagcacacggatagaggtgatgggcgttttcagctcatgggacacattggagacaaactcctggcgcgactggtctacagccttgagcttgctcagggacttctggactgactgggacaggagcctggtctccctgtaagtctcctctgtgatgtccgcatccaaatctccctgggccaccctgtcaaaggacatctgaagcttcttaaaaggacgcagcagcaaatgggccgccgccacccccaaaacactgataagaagaaccatacacaccagaaacagatgggactttcccataaccttatctgtcagggacagaatgttctccgtggatgcggtaaccacaatgactccgctcacagcttttgcgtccgccgtgtcatacacgggaatggtctgggcaaaatactgcatatccttgttgtaatggctgctgttctcacccttgaaacacttgatgacttcttctgataaataatactttcccgtggccagattaaaggtatctgtcaccacccggaaattgcttcccacaatgacaattcttccgttatagacatcagacagggtctgcatctggctgtccaggctggcattgttctttttctcggccgtcatatagccggaccgggtcatcttattgctgagtataacacactggttctgtatctctataaacctggcgtccagctggctctgccggaatgttcccagcataatgccggcctccagaaagagaggaatcagggcagcgcctatgatgatggctgtcagcggtaccttcatgctcatgccgaaggtacgcagcttcttaacaaatttcttttccgacacttattccagctcctttaatttcctggtacaggcgactgccagggcgccagggccgatatggcatccaatgctgagggacaggggagccccaaacacgggaaccccgggatacaactcccttacagtctcttccagctcctgggctgcctgctcactgcatgtatgggcaatctgcagataggtgtgttctgccttcggatctgccagacgatcctccaggtcatgggccagggcagtcagcatgatggtcttggcctgcttcatggtccttgcctttgcaaacgcatccagcttttctccctggatggtgagcaccggctttattttgagcaatgtccccagcgctgccgcagcaggtgtaatcctgcccccctttttcagatatttaagggtatccaccgtgatataaatggagctgtcaaacctggttgtctcaagcttttcctttatctgctcaccgctccatccccgctctgccaaatccctggcgtccagggcagactgtctctgggtaacagaaatcctctggttgttcaccacctgaacgcgcccctcataatcttccgccagcataagagccgtctggcaggaaccgctgagtccgctggacatgggaatgtacaccacctgatcatggtcctccagaagctgttcccactgttccgtcacgtctttaggcgatggctgggatgtggtgatttcagccccttcctccatccttgcgtaaaaatcttcatggcttaaatcaattccctcataaaaaacctgcccgtctatcatgaaaggcatgggaagcacgtatatgcccagctcctttgcctcatcctgcgttactccgctgttgctgtccgcaacaatagctattttcatattaaatgttctcctttatgcaatcccctggttcagcctgtttgcagttgtatataactggtaatacattcccttcttctccagcagctgttcatgattcccctcttccacaatcttattgcctgccagcacaagtatgcggtccgcaccctggatggtggtcagacggtgggcaatggtaagagtggtacggcccactgccagcttctccaatgactgggataccaggtattcactctcattgtcaagagccgatgtagcctcatccagaataagaatggccgggttcttcaggaatacacgggcaatgctgatacgctgcttctgtcctcctgacagcttgaccccccgctcgcccacatacgtatcatatccgtcctgcagctcagtgataaactcatgggcgcctgccagtttggcagcttccataacttcttccctggtggctcccggacgtccgtagctgatattctcatagacagaacctgagaacaggtaaacgtcctgctgtaccacgccgatgttggaacgaaggctctgcagtgtaacgttctttatatcctgcccgtctatggcaatgctgcctgaggtggtatcataaaacctgggcagaaggttgcacatggtggtcttaccgccgccggagggacctaccagggcaatcctctcccctggccttacggtgatgtttatgtcctccagtaccggcacatggtcatccggatactcaaaacttacgtggtcaaaggaaatggctccctttacatgctccatcttctttgcatttttgctgtccttgatatccggcaccacatccatgatttcctggaaacgttcgataccggtgattccacgctggaactgctccgcaaactctatgattctgcgtatagtggtaagaagggtggttacatacatggtataggccaccaaatctcccggctccaccttgccctgaatcatgaaaatgcctcctgccacaatcaccaccacatacatcagtccgtcaaaggacctggtggtaatctgaaaagccgccatgtagcggtaggtatacttcttaatatccatgaaatcccggttgcccttgccgaacttggcaatctccaccggctcattggcaaaggccctgaccacacggttgcccagcagggtgtcctcaatctgggcattgagctcgcctatctggtttctctgcctgcggaatgcctccttcaccttcatgttaaaccaggtacaggaaataatcataaccggcaccagcacaaatatgagcagggtcagttccagattgatgcctgacaggatgatgaaggagaccacggtttttagggctgctataaagaactcctccggacagtggtgggcaaattccgtcacgtcaaacaaatcactggtaatacgtgacatgatctgtccaacctttgtgttgctgtaataactgtctgacagcatctgcaaatgctcaaaggcgtcctggcgcatatctgtttcaatgtatacacccatcacatgccctgtataggccatgtaataggctgccagggagtcaataatccgcagaagcaggtacagaccgccgattctgattacaattccggctgtcatggatgccagattctgcatcccctggtttgtgatatagcgcagcatcagaggaagaatcagttctcccaatgtagtcagagccgcacagaataaatcaaatatcagaatcttcttatatcttccataatatggaaggaagctttccaaaagcttcttcgttttcatacctttttttccagacacaattcaaactcctatcatatgttatatcaattaaaattatacaaaacaggccatcagagacttctacggcctttgagggcaccaacttccattttatcctatttcccataaaaatggaagggatatttcataactttaaaaccgtaacttgaaagccgcagcttgaaagccgcaaccgctcaggcagcccatcttcccggccggaaaagcccctcacaggaaatattactttgccttcagctgttcatagataccgcgaatattctggataaactccggatgcaggaaatccttctgatataccatgtcgatctggcgcaccatggaggaattttcaatgggaataatggccagccggccgctggcaagttcttcgcggcaggcgcttttggcaatgatggtaattcccaaatccatggttaccaactccttgatcatggacacgttatccagttccatcatcacgttaaactcttccaggctcatgtccctggcccccagatgtttctcaaacagctgccttgtgcctgcgctgcggctgcgcagaatcagcttttcatggcgtatctcctccacggacactgtcttggccctggccagacggtgcatgggcgaaacagccagacacaggtaatccgtgtccagggtggtggacactaacgccgcatccggcacccctccctccaccacggcaaaatccaattcatatgccttcaggcggctataaattttttgaatggtattgacagaaatatttatatgtatatccggattctcattacagagggtggccagcacctggggaataatggtctcccccgccgtgggagtgatgcctacattcagatggctggtctccgtcttgctatcctcaatagcctggcaggcgttggaataaacggcagctgccctgcgggcgtactgcaccagaatctttccctggggagtcagcttcagtttgtttttgctcctataaaatatttttatatcgaactcattttccagcaaacgaatctgatgactcaccgccggctgggtcagattcagcttctgagctgccttagtatagcttccggactcgataacagccagaagagtctttactttcatgtcaaacacaggccagtccacctccatatataaatattttttatatcccaatcaaataatatcatttgattttatcaccaaacactactataatcaagcaaaacaaaaaaacgcagaaaggagtgttgattatggcactatttttatcaaacctgggagcagcaggaatcatattgaccatagcagtcatgctggcatccggctttctgttgacacgaatcacaaaacggcttcacctgcctaatgttaccggttatattattgcgggagtcatcatcgggccctggtgcctgaatcttgtcccttcacaatatattggacagatggattttatcacagaccttgccctggcatttatcgcatttggagtaggaaaatatttcaaactgtcatccctgaaagccaatggaaagaaaatggtgattctgactctgtttgaatccctgaccgcaggcatctttatcacaattgttatgctgattatggggttatccctgtccttcagtctgcttttgggagccatcggctgcgccacggcccctgcctccaccattatgaccatccggcagtacaaggccagagggccttttgtggacaccatcctgcaggtggttgccctggacgatgcagtgtccctgatagccttcagcgtgtgcgcggcctttgtccaggccagctcctcaaacggctctgtgacggtttcgcagattgcctttccggtgctctttaacttattggccctggcgctgggaggactatccggtgtggtgctcagcaggctgatacacaagcgccgcagcaaggaccacagcctggttctggcctgtgtcaccattatgggcgtggccggaatctgtacttcccttaatgtttctcccctgttggcatgtatggcctccggcgcagcctatatcaatgccagcggcaacaaacacttatttaagcagttaaaccagttcacgcctcccctcctggtgatgttcttcgtgctttccggtatgaggctttccattcccagcctggcagctgccggcgtgatcggtattgtttactttctggtccgcattgccgggaaatacaccggttccgccctgggcgccgcggttacccacgcttcaccggaaatccgccgctactttggcctggcgctgattcctcaggccggcgtttccatcggcctggctgtgctggggcagcgcatgctccctgccgaaagcggccagctgctctcaaccatcatcctgtccagcgggcttttgtatgaaatggtagggcctgcctgcgcaaaagcttccatcaagttatccggaagcgttccgggaaaggcagctgttgataaggcagctgccgggaaagccgctgctggaaaagccgctgctgggaaagccgctgctgaaaaggcatctgctgggaaggccgctgctgaaaaggccgctgctgagaaagtgattgccggcagttcttctgcaagcggaccagatatcgccaaagcagacggggttgaacaccctgtgcataaagcgggcgccgcggctttggatgaacagacacgaaaaaaagccccggacaccggcaatgatacaaatgatacggtatcggcccagcaagtccgcccaaggcatgctgtcgtctgactgtttttagattcatttgcgcctaatccagcactcttcggccaaaaaagccagccccggacattcggagctggcttttacgcatatttattctcacttcattcttcttacttaaccagcaatgatttgccggtcatttccttaggctgctccattcccatgagctcaataagggtgggaacgatatcgcacagggcgccgccttcacgcagcttgcaggatgggtctgcatttaccaggatgaatggtaccggattggtggtatgagctgtaaatggctccccggtctcatagtccaccagctgctccgcatttccatggtccgcacagataaacatgacgccgtccacttccctgatggcctccactgcacggcccacgcaggcatccactgtctcgatggccttgatggctgcgtcctctaccccggtatggcctaccatgtcagggtttgcaaagttgatgatgatgacatcgtatttgccggatttgatggcttccaccagcttatcgcacacgccgttggcgctcatctcaggctttaaatcataggttgcaacttcctttggagaaggaaccagaatgcggtcctcaccctcgttgggttcttccacaccgccgttaaagaagaaggtcacatgcgcatatttctcagtctccgcaatccttacctgtgtctttttgtgggctgccaggaattcgccaaaggtattggtgatactctccttcttaaaggcaaccagcttgttctggatggtctcatcataatccgtaaagcatacatacaccaggtccagccttttctcccttgggaagccgtcaaagctgtcgtcgcagaatgcacgggtaatctcccttgcacggtccggacggaagttgtagaaaatcacggaatccttatcctggatggtggccgcaggcttgccgtccttcatcaccacaaaggggatgacgaactcatctgccttgccgctgtcataagaagcctggatgcctgcagcagcgctttcagcctgatttccttcgccctttgtcagagcgttgtaagccagctccacgcggtcccatctcttatcacggtccatggcatagtaacgtcccatgacagacgctacctcgcctacgccgatctccttcatctttgcttccagctgctccacaaagccctttcctgattcaggaggcgtatcgcggccatccaggaaacagtgtacataaaccttctttaagccgttcttcttagccagctccagcaggccgtaaatatgggtgttgtggctgtgtacgccgccgtcagacaccagcccgaacatatgaagggcagaatcatgttttttgcagttttcaattgctgtgaggaactccggaatctggaaaaagtccccgtcctgaatggattttgtgattctggtcagttcctggtatacgatacggcctgctcccatgttcagatgacctacctcagagttgcccatctgtccctcgggaagtcccactgccatgccgctggcctcgccctttacaaaggggcactggctcatgagctggtccataaccggagtcttgccctcgcatacagcgttgtgctggcagttatcgttcagtccgtagccgtctaaaatcattaatacggttggttttttactcattttcaatctccttctgttttaaatgccctgccgccttatggcgcgtgaatcccgcattgggtcacgctccggtcaggagcagggcacacattccgttattacttgttgtaattgacaatcttgccaaagtcaggctttaaggaagcgccgcctaccagtcctccatcaatatccggctgtgcgaaaagctccggagcggaagatgcggatacagagccgccgtactggatacggattgcctcagctgtagcctcatcgtaaatctctccaatgcatacacggatagctgcgcagacttcctcagcctgctctgtggtagccaccttgccggttccgattgcccagattggctcgtaagcaataaccgcagtcttagcctggtcagctgtcacattcaggaatgcaatcttaatctgctggcggatccagtcaatggtgattccctgctccctctgtgtgagtgtctctccgcagcagacaatcggtgtgatgccgtgttcaaaggcctttaacacctttttgttcacggtctcatctgtctctgcgaaatactcgcgtctctctgaatgaccgatgattacgtacttaacgccggcgtctaccagcatgttgggagaaatctcgcctgtataagcgcccttctcctcatagtacatgttctcggctccgatacagatattggatcccttagctgcttccatagcaggaataatgtcaatggcaggcacacagaataccacatccacatcctcattcgctaccaatggctttaactcatttacaagggcaaccgcctctgacggagtcatgttcatcttccagttgcctgctataattttctttcttgacattgtattttacctctccctttcacactgtaatcacttatgggaaaaccgaattaagctttgttgtcagctgcagccacacctggcagttccttgccctccaggaattccagggaagcgccgccgccggtggagatatgggtcatcttatcagcaaagcccagtctcttcacagcattgacagagtcgccgccgccgataaccgtggtggcatctgccagttcagcaaccgcacggcatacttccagtgtgccttctgcgaagttggagaactcgaacacgcccataggtccgttccacacaaccgtcttggcgccctgcagtgcttccttgtaaagcgcgatggtcttaggtccgatgtcaaatcctgaccagcctgcgtcaattacatccactactttatgctcggtgtcgttggagaattcctttccttccacatggtcaacaggaagcagcagcttaacgcccttctcttctgccttcttaatcatctccagtgcatagtccagcttatctgcctcacataaggaattgccgatttcctggccctgtgcctttgcaaaggtgtaagccatacctccgccgataatcagggtgtcaaccttgtctaacaggttgttaattacattaatcttatcggaaaccttggcgccgcccagaatggccacgaatggacgaaccggattctcaaccgcctgtcctaagaacctgatttccttttccatcaggtatcccaccacgttctccttggtaaatctggtaacgcctacgttggagcagtgtgccctgtgggctgtgccgaatgcgtcgtttacgaaaatgccgtcgcacaggtcagccagctcttttgcataagcctcgcttgcagcatcgccgtctttgaatttggtctcctcaactctgtaacgggtattctgaagaagcagaacctctccgtcctttaactcagcagctaccttctgtgtctcaggccctgttacctttggatcgtccacaaacttaacctctacgcccagtctttcgctcagagcaggagcaacaggagcaaggctcatctccggaacgggctcgccctttggcttgcctaaatgggagcacaggataaccttggcgccctggtcaagaagcttctttatggtagggatggctccgtcaatacggttatagttctggataacgccttcctttaacggaacgttgaaatcacagcgtaccagtactttttttccctgtaaatcttttaaatcatcaactgttttcttgtttaacatatttctttcccctttcagagtcattgatacatttggcgaacaaagggcccggcccaaacgaccggacccttcatgagtctacttagaaattactgtcctgttgtcacaattagcctaactcagcaaagtacttgattgtccttaccatctggcttgtgtaggagttctcattgtcataccatgaaacaacctgtacttcatacagatcatctgcaatctgagctaccatggtctgtgttgcatcgaacagagaaccatatctcatgccgataacgtcggaagatacgatggcatcctcattgtatccaaaggactcgctggcagctgccttcatagctgcgttgatgtcttcctttgtaacaccagccttcttaacaacagctgttaagattgtggtggaaccggttggtacaggtacacgctgtgcggaaccgattaacttgccgttcagctctgggataaccaggccgatagccttagctgcaccagtggagttaggaacgatgttagctgcgccggctcttgctcttcttaaatcgccttttctgtgtggtccgtccagaatcatctgatcgcctgtgtaagcgtggatggtggacatgataccgctctggataggagcataatcattcagagccttagccataggagctaagcagtttgttgtacaggaagctgcggagataatcttatcatcagctgtcagtacattctcattaacgctgtatacaatagtaggaaggtcattgcctgcaggagcggagataacaactttcttagcgcctgcctcgatgtgtgcctgagctttgtccttagagcagtagaatcctgtacactccagaactacgtctacgccgatttcgccccatggaagatcagcagcctttggctccttgtagatggtgattttcttgccgtctacagtgatggaatcctctccagcctcaacagtgtgcagaccctggccataaacgccggcatatccgccctgtgctgtatcatactttaacagatgagctaacatcttaggatcggttaagtcattgatagctactacatcgtaaccttctgctccgaacatctgacggaaagccagacgtccaatacgtccaaatccattaatcgctacttttactgccatgattcaattcctcctagtttgttaaaaaatatattattgttaaatattaatcaacttctctctattgtaatcaatttctaaagaaatggcaagtcctttttttatttttacggatctttgacctttttatacgaagaaaagactggaatcttgccattcgggtattttctgctataatgttgttatgaaatgcgtatgaaaatgccggtattaataaaaatactgctgttttttattaagaagctattatttatatagaagcaaaggagaagctccgatgatatacgactgccatctgcacactgaattttccggtgactccaacacccccatcagcctgcagattgagaaagccatagaactgggcatgaaggagatgtgcattaccgaccaccacgactacgattccggattctgcgactgtgattttatcctggatatccccacctatctcacgtccctgcgcatgctccaggcagagtacagggaccgcatccgcatcaacatcggaatcgagctgggacttcaggatcatcttaaggaatatttggagcactttgtaaagcgctacggggattcctttgatttcatcatcggatccagccattttgtaaagagcatggacccatatgacccggaatactggaacaagcggggcgaggtgcccggctttgaggatttctttgaagcctccctggtgcgtgtcagagacctgtgccgcacctttgattcctttggccatctggattatgcggtgcgctacgctccccaccagaatgacttttacgactaccggcatctgagccagtggattgaccctctcttaaagattcttattgaaaacggcaaatccctggagtgcaacacaggcggtttcaagtacggcctgggccagcccaatccctgccggaagattctcatgcgctaccgggagctgggaggcgagatgataaccattggttccgacgcccataccccggaatatgtgggttatgcctttgacacctgccgcgaactgctgtctgactgcggttataaatattttactgtgtaccatggcagaaagccggaattcattcctctttagccgggagtttccgtctgcgtctgaaaacgccgtacaatcttttacctcaagactgtacggcatttattatatttatgtatttagtttaatatgtctatgcacctcatcccgcactttccgtcttcatggccgtctttacatccttaagaaactgctcccatgcgtcctcatgctccacataatacttggggcagagtttttcattcacatcataatggcgtataacgtccccgggcgtcagtttcagctgcctgcagaggaaggctgtcaaatccaccagggattcataggtggcatcattgaactttccgctgtcgtccggatggcacacctctatggcgactgtggtgttgtttaaaggggcattggcataggcaatctcatttacagggatgcactggataacttcaccttccagccccaccacaaaatggctgctggcagacgaaccgcttttttgcgggtcctggtcagccaggctgtcaaaatagtccctgttattcttggccgtggagccgggattggccacatagtgtatgacaatcttatccaccttctgacgccccacgtccggtctggaaaatatattcttccttataaaatcctgctctacataatccggcacctccaccgccttcaaatccacggtataaggccgctcccatccccagaggtaatagcctccgcccagaccggcgccggcgcccaatatgagcaccagcaaaagtgcaaggaaggatacgcctttgcccgaacggttccggtgttctcctgagcctgaatttcctgcttttttacttctttgggaccggtcagccttctttccggtgttctggacctcctgcgccgttctgtcagcagactttctggctgcagatgttctggctgcagacgttctggcctccggcgccccatctcctataccgggctttctcctggaaatccgctctcgtctgggcctgccccctatgtaggaatcccccacaggaggattctgccggcctgacgcaggcctgttgggctccagcggtacctgccggatatcttcgtattctctcatcctgtctatatcgttggtccgttcctctttcatcctttcgtacacctttcattgattcatgttccgctgattctgtcacatgaacaatataacatttttcagcctaaaacacaatggatgttgcattttataaaccaatctgtaaaatcttaaaatagatgcaactttatccccgcctcagacgtctaacagtcagaaggatacgaaaggaggatgcagatacatgggcttatacaacaatacggcggaaacagaacgtctccttacagaaaattatgaacgctactaccgcctggcatttaagctgatgcgaaaccaggatgatgccctggatgtagtccaggaaagcgcctatcgggcaattaaggactgcaaaggggtcagaaataaagactacctgtccacatggatttaccggatcgtggtcaacacaagcctggatatgctgcgcaggaaaaagaaagaaacacccacagaagaaatgccggagactcccacagaggaccattaccaggacctggacttaaaacagatgataaaccggctggatgacaaaagcaggaccgtcatcatactgcggtattttgaggatcttaaattagaagatattgctgatatagtaggtgaaaatctcaatacagtaaaggccaggctttaccgtaccctgaaaaaactaaggctggaactggagccaatgcccttgggcgcaaaccagaaccatttttcagaaaggagccatgctcatgaaacaggaagaaaacagaccgatggataagctgaaatcagattatgaaagcataccggttccaacggaagcaaaggaacgcatgcttgcgggcattgcccaggcaaaaaaagaacagaaaggtgtgattatcatgaaattcgcaaaaaaaacaggcggggccgctgccgctgccatgattgccattaccgtgctggccaacgccactccggcccttgccaatgccatggaacagattccggtcattggatccattgcaaaggtggtaaccttccgcacctatgaagataaaaaagataattttgaggcagatatcaaggttccccaggtgacgattgaagggaccgagggcgcccaggtaccggccaacaaatccatagaggattacggcaatgagcttatcgccatgtacgaggaagaattgtccagggacaacggagaggggcactatggcctggattcacagtatgaagtggtgacagacaacagcaaatacctgtccatccgcattgataccacccttaccatggccagcggcactcagtttgtcaaggtatttaccatagataaggttaccggcagcatcatctccttaaaagacctgttccatgaccgtccggaaatgctggaggccgtcagcgataatataaaaagccagatggcccaacagatggcaaaggatgactctgtggtgtacttctaccaatccgatatgccggatgaggatttcaagggactaacaggcgatgaaagttattacttcaatgaaaacggcgaacttgtgattacctttaatgaatatgatgtggcgccgggatacatgggtgccgtacaattcaccattcccggttccgttacaggtacattttaaataccgaatcctgctaaatacccaatcctgccatgcatattttccatccccgccttccatactaatcctgaggtgatgaatatgatagagcgagatgaacttcccattggatttaccatggagctggccatgaatcccgaagccatgagccgtttctccggtcttacggagccggagcagaaacaggtggtaaacagggccagaaacataatgagccatgaggaaatgcgcaactacgtggaaaatatgtttacggaaggatgatggcacatggacagaatacagacacccggaaagcaggatcccggcagacaggaacccctggaacttccaggaagaaacagcagcacctatggggatggagacattcctgaaatagatttacccggcgctgacaacgccacccatgattttcctcaggaatttcctgaaaaccgcatgcagtcctgatgaatcagggctgcatttttccgcgcacttttacccccttccttcccgggccggtgcagatgcctgcaatcgtcacagcacaaaacagcacaatgcccggaggaccgcagatacggcccgctccgggcattgtgctggtatgtgttctgtttcaggtacagtccttacggactgtcctcattgcataaacggaggaggagggatttgaaccctcgcgccggtgctaccgacctactggtgttcgaagccagacccttcagccacttgggtactcctccaaaaaaatgccaactactgcattatacactaaaatccgtgttttgtgtagtagttggcgttaattttttagacattttcgcaaattctaaaactgcctttcatacagcctcaaatttcctctaactggctgctgcctgcatctcggtatattccgcaggatttggaacaggcacatccacgggctggccgggatccgctattcccacatcgccgtccagattcacactgaaggtctcaccctgcatggtcatatccatatccatcttaaggcgcatcttaatgcagtcgccggccggattaaccacatattctccgcggatattgtgaagcttcatatcaaggccgtccagcatgcctgtaagtccggtggaacccagtaccatctgcatgtactcgttcatcttggcatcattgatggtatagccgatgaccttgttctctccctcatcccacaggctaaagtctccaaccaaatcttccggcacatcgaatgccttggatgacgccagggcctggttcatcatgtctcccatggccacagggtacttaaccttctggcccagcatatccatgtagatataaccgtccagataatacatggaataggtgataggctcactttccggaaccgtcatacggcaataggccatgtagcgcatctggctgggatcctgtatatgattcatcttcatattcatctccagccgcatatcaacgggatcaataccttcattctcaaacaggctgcctgacatcttcatcttgaaatcgtaaaaggcgttcatatccgtcatgttctggtttctggcttccactgccttgtacagctccaatgcttcctgtgactgggccgcataggcggtcatgggacataaaagggcaactcccagaaccactgccgccagacgtttcatcaatttcatgtaatccctccttgtcttaaacaaacctttggtgttatgtccattgtaacgcatcaggtattatttgtaaatgtggaaggatttacgttttccttacatttacaattgttctttattgtccaaaatactggttcaccccggccaccagtccgtctgccagcgtggccagcgtggccgaagagtggtcggatgccttatctcccagctctatatccacagaaggcaccgtggaaaaggaagtctgggtcagatccatggccatggagccgccggaaaatatcttgactcccgcccccttaaggccagccaccaggctttcaccaagggcgttgtgctgctgccagtgggactttacaggttccatgctgcggtatgattccacattgggaacactcatgtaaaatgcccctttgttattggtggtggaatcccagtgaagggcaatatggcagtcgcttgcattgttggcaatgacggttctggctatgttgtccagctggacatcgtcgctctcccggatcatcagcacatcatatcctgccgccagcagcttatccttaagtatttttgccatggacagcgtcaccttactctcaggagttccgtcagaaaaggtcatgccgcctgacacggctgccgcagaggtggcccctgcgccggtagtgcctccggttaccttgggagtgccgtcgggatgacactgcgtcttgacagaagctcccccctttgttccatgacccgcgttgacacaaaccgtaatgcctttgggactggctgcctcggaacggtacaggactgccgcacccgaattaatcttggaaaactccgcgtatttccacgaaggattcagggttacctccccgctgtccacacatgcctgaggcggcaaagctgcggtctccggaacctgggtggttatatatcccgatgatatgtagcccgctgtcccattataatcaattctggtccattgctctcccttcccggtgcgctttagcgctgtcccgggactggcgtatgtaagaatgttggaatcatccccggtatcgcaggcagagcgtatacgcacactgccgccgtctgatgatttcacataaaccgtgtccgacacatcctcaaattggggcatgggggctgtggtccgctctgtgtccagtttgatggtctcagccttattgccattatccgcactgccttctccctgtacagctgaggccccgacggctgccgggctctcccggctccaggacgcctccccgccttcggactggattctggccttcatctcgctgctggactcatagttttggcaaccggtcagtcccatgccggcggccaggatgcctgccagaccaatggcggccagaccatttacccgccgtttgctgcatgccgttccgttatgttctattctgtctgtgggcgccccgctgcttttacatccggcgcttctttctcttatcttccgcttcatcttattatggtacctccgcctgccacataatccccgtcgtagaataccacggcctgcccgggcgtcacagcccggaccggctcatggaaacagcattccaccatatcatccccgatttcgcggatggtacaggggcttcctctgtggctgtatctgattttggccatgacgtccatgggctttccgtgaagtccgtcaactgccatccagttcagtttatcgcagcggagcacatttgtaaatacatcctcattgtcaccgatgacaacttcattcgtttcagggcgtatttccaccacgaaaacagggcgtcccatggaaaggttcagcccctttctctggcccaccgtatagtgtgtaatgccccgatggcgccccagaacatggccgtccaggtccacgaagtttcccggcggcagctcccttccagtgtactcctcaataaacgacgcgtagtcgtggtcagggataaagcaaatctcctggctgtccggtttatgcgccaccggcagccccaggcgctttgccatatcccgtatctcctccttgtggtagcttcccacaggcatcagggtatgggacagctgttcctgggtcaggttatagagagcgtatgtctggtcctttgcggctgtaaccgaggttttcagggaataacgccctcccggcagcctgtctatctgcgcataatggcctgtggcaatgtaatcagccccgatggccatgctccgcctgagcagcgactcccacttcacatggcggttgcaggcaatacacgggttgggcgtccttccctccacgtactcacccacaaaataatccatcacgtttttacggaactcttccttaaaattcatgacataataagggatacccaggtccatggcaacccttctggcgtcatccaccgcgcttaaaccgcagcagccgccctctgcctcctggacctcagtatcctcatcctgccaaatctgcatggtcacgccaatcacatcgtaaccctgttcctttaacagccaggctgccacggaggagtcaactcctcctgacatgcctactactaccttcctgctcaatagttctcctcttcttcctcttcctcaatattatccttgggcttttctaagccctcaatggtaataccgtttttctgtgcataatcccagagggccgcatggattgcttcctctgccaacagagaacagtgtaccttaacaggcggcagtccgtcaagtgcttccatgactgctttattggtaacagccatggcctcccggactgtctttccctttaccagctccgtggccatgctgctggttgccacggcagccccgcagccaaaggttttgaacttcacgtcacggataacctgattctcatcaatatccaggtaaatccgcatgatatcgccgcatttgggatttcccactgttcccattccgctggggttctctatctcacccacatttctggggtgctcaaaatggtccattactttttctgtgtacatctatattcctcctgaatcgttccaagtttatctttcatacaggattttccctgtatattattttttctcactgccattgtgcttcatataatcctcatacaaaggcgacatgctgcgcaggtatcccacgatatccttaatctgctccaccacataatccatctcttcctctgtgttctcctcgcttaaggtaagacggagggagccgtgggcaatctcatggggcagcccgatggccaaaagcacatgggaggggtccagtgacccagaggtacaggcggaaccgctggatccgcagattcccgccatatccagtttgatgagaagggattcaccttcaataaactggaaagcaaaattcacattgttgggaaggcggctggtgcgtgatccgttgattctggtaaagggcacctcatccataacccgcttcatcagataatcccgcagctgcgtttccctggcagcccgttcctccatggtggccatggccagctccactgccttgccgtatcccactatgccgggcacattctctgttcccgcacggcgcttgcgctcctgggcgcctccgtggataaaggaacgaatctttacgcctgtgcggatatagaggaatccgattcccttgggcccgttcagcttgtgtccgctggagctgagcatgtcaatattgtactcatccacatggatgggcacatgggcaaatgcctgtaccgcatcggtgtggaacagaatcccgttttccctggcaatggccccgatttccttgataggctcaatggtgccgatctcattattggcaaacatcactgatatgaggatggtatccggcctgatagccttcttaagctcatccagcttgaccactccattttcatccacatccagatatgtgacctcgtatccccttttctccaggtactggcaggtgtgaaggatggcgtggtgttcaatcttggtggttatgatgtgttttcctttatttccataggcctcagccgtggccaccagggcccagttatcggcctcgctgcctccggccgtgaaatatatctcattggtctttgcccccagtgactgggcaatggtctcccttgcatggtttacagcctttttactctcagtggaaaaatcgtagaccgaggagggattaccgtaatattctgtaaagtatggaagcatggcctccaccacctccggcctggtctttgtggtggctgcgttatccagataaatcaattgcttcataataaaaatccgcctttctgtagtcctaaagttaaaagcttcatctacgctttttactataccatagtattcctacaatttcaataggaatacttgttttatatggtactactgttattatatgaagcacgtgtgcgcttaaacaatcataggccggattattcaggcccaaaggaaccgcaaaagggcagtcgaatcatataaaaattcgttctgccctctcatcatttaacaggatattctattatatattctattacgtattctattaataccagtacggctcccaatcccccgcaagtcttgtaagcgcctccatatagaaataatcgccccaggtattgcactcatccacgccccggttggcgcagggattgcctgcgctggccctggcataggtaccgtggagaagaaggccgttggactcctcatgacacctcactgcgcaccggtcactgagcgccttcaccagacgcctggccatatccccataatatgccgcctccccgccttccatatacttaaccatctccagcataccgcaggccgcaattgccgcggaggaggaatccctaggctctgaactgccgtcgtcaaaatcaaaatcccaataagggattaaatctgacggcagatgctttagaaaataatccgtcaccttccggaacacatccgcatactccggttttctctcaatccggtagctcagggcgcttccgtatatcccccaggcctggcccctgctccaggcagagccgtcccggttgccctggtgggtgacgccttttacaggagctcctgtctccgggtcaaagaaataggtgtggtacgtactgtggtccggccgaatcacacagtccatggctgtccttatatgggcttctgcctttttccggtacgtctggtctcccgttgtctcactggcccagaacagtaacggcatgttgaggaggcagtcgataatcagacggtaattgtcctttgcccccagctctccccaagcctggaaaaactgtcccttttcctggaatcttcctatcaggttatccgcagccatgagcgcggccttcctggctgtctcattgcctgtaagacggtacgcggccacgcaggaaggggtatagagaaatcccatgtcatggttgtccacgtccacccgctcctttatgcgctccaggaaggattctgcctgtatggttcctgcctccttaaatacctcctccccggtccgctcatatgccagccatatttccccggtccagaagccggtggtccattcccggttgctgctttggggatagaattggttccggctgttggaatccggaaaacagcgggtaaaggtcttcaggttttcccgcaccaggcttaccgccaggtccaggcaggcttcggcttcactcttttccatgattgtataggtttgtaaactgtcctttgtctgcattgtctgctcctttgtctgctcctttgtctgctcctttatatgattctggtgccgccgggcggcattggtactggtcctgtttaccactggagcacggtcatccggccttccctgtccgcttcgtcgcagaccatgacccgccccaggccgtatctaccttccgcgccgatgtattcgccgtccgccccagtttccagatggttcaggactaccagccaggaatgttttccatcctgtatccgcaccgcttccgcctcctcgtcctttaagcatctgccggtaacaggggaggtgacagatacgcggctgaccgtataggggttgccgctgcctgtttcgtatccggctgccactgtcagcatggagcagggcagagcggattcccgccacagactgacgcagggtgcgtattccagctggttatagtgaaaggacaccggagtctcttccagctccattttgccgccgcccccaccagaccacggggccaccctgtaaaacgctgcctctgccctaattccatggtacagaaatacatcctcccgcatttccacgcttccggcgggattcagatggaatacctggctcagcacatgggttcccgttccataaaattcatcggcgatcacatgaatcctggttcctatggatataattctgcggtttaccagaaccccggcaggcagatatcccagatgggttccctgtaaaaatgtatacggccccttttggctccagtcctgtcccgcgggcgcggtccttcctttcacgtcccaggaaccggtgcactgggtatattcctgccaatccaccacaggcacattgtgggcacaggaggacttaagctgcctgcgcaggctgccgtccacataggtatatcttccggaatcaataagcacatcttccccggctatggacaaatccacatgcagtttgtcaaaatgtccatggccgcctcccagggaaccgcacttaaagtggaggtaatccgcatttctgtcccatccggaccggaggcaccagtttccgctttgctccagggcatgaaaaaggcattccggcgtctcggatctcatgctctcgtattccagggcagcatccgccccaagatcccagacgctctcaaaatccaggcggtcgtatccggcatacctgagccggttatcctttaaaatccaggccgcaggggtgaacacatcccgcaggtccgtcctgtcgctgtcaccatttaagggctgggtcctgtcaggcttcatccaggccaggtccgccaaggccattgccctggctttttcaggaagggaccggggcaggctgattccctgttgccctgccacgcgcagcacctccagcagacagcgcagcacctcgttgtggtacatgggagactgctcccactggactccgtcatccataatctggatatccagttcccgcaccaggcgcaggacggcctctgctacataggcttccccccggcgtgcaaggcccgcggctgcgtccgtggcagctgtatcatgagcagctgcgtccgtgacaccttctccccaagcatttcctctacatttcataagatatgcgccaatggcaaacagtccgtggctttccagcactccccagttgctcttatcactgaacggcacccggcagtccatcagatattccccgtggacccggagcccttccagaaaccgttcccttaccgcccgggtcaccacaggacagtcctcaaaatattccatggcctttacccagttttctccccggatacctgcctctatggtcctccaggtagtgttctttgtctcctggtttatgggattgtcctccagccaggaatacagctggttcacaaaacacccggcatatttcccgtccccggtcagggcatatgcctggcccagacagatccagtaccggtggcggttaaactggtatatgaattccgggtcgccttcgggcatatgccgccagtcgatttttccctcaaatgtcacggcctttacggtctgttccatgtcccagggaaggtcaaacaggaatctttgtgccactgcgtcatctgcaattcgcagaatatgggcacattcctccggccagtactgcctgcagtatccgctgcaccatttcatgtcaatcttcttattctccatctttgtcctccccggttttacatctgcgcatcagttatatctgcacatcagttgtatctgcgcatcagttgtatctgcgcatcacttacattcccctgtcaggccgtcatccatcagccctttacaccgccggccgtaatgccctccacaaaccacttctggcataccatgaacacaatcagcaccggaaccagggagcacacagacgccgccataatcaacgcatagtcggccccgtactgggaaatgaacatgcggatacctaactggatggtctttaacttggtgctgtttaaataaatcaatggtcccataaaatcattccagatatttacaaatgtaaagatcaccagggttgcgatgcctggcttcacaaggggcagggcaatcttcgcgaaaatcccatactcggaaagaccgtctatcctggccgcctccaaaagctcattgggcacccctatcataaactgacggattaggaacacgccaaagccggaaaaagcctgcatcagaatcagccccagatgggaatccgtaaggcccatcctggaaataagggcaaactgaggcaccatatatgcctgccagggcactgcaaaggtggtgaccgataccaggaacaggaaatcccttcccttaaactccaccttggaaaaaccgtaagcggcaaaacagctggtcagcacctggagcagggtggtgcacaccgctatcttaaaggtattcttaaagaaaaccagaaggggtatcttatcccagatggtctggtagttcacccactggaattcctttggaaacagcttcatgggaatgctgaacacctcattgctggtttttacggacgccaggagcatccacccaaagggaatgaccaccagcactgccagcacgctcagcagcatatagatacctattttactttttaacgttctcgtttccatcctctgcccctcctatacgtaatccgtgaacttcttttcgccctggaactggaccagggtcaccaccagcacaatggcaaagagcacaagggcgctggcgctggcatagccgaacttaaagtccacaaaggccgcgttgtagatatggttcaccagtacattagtggatcttccgggcccgccgccagtcatgacatagatcaggtcgaataccttaaagcactgaatggtcatcatgatgataacgaaaaacgtggttggctttaacatgggaatggtgatatagcggaatttcttgaagcccgtggcgccgtcgatgctggcagcctcgtacaaatcctgggaaataccctggagagccgccagatacaccaccatgtaataccccatatacttccacacgctgacaatgataataacggtcatggcccagtccgtggatgcgcaccacttgggcggattggcaatgccgatgaatttgaggaattcattgacagggccgaattccggctggaacagcatgttccacactgcgcccaccgctaccagggaggccacataggggaagaaaaacgcagtcctgtacaccacaatgccctttatcttggaatttaacagcacagcgatgagaagggccgccaccatggtaagaggcacggtaaacaccgcgtaatacagggtgtttgtgacagaaatccgaaagccgctgtcatgaaacagcttcacgaaatttttaagccccacaaactccataggtgtgctggatccgtcccatttcatcacacataagacaaatgtcaatattaccggaacaaagataaatataaaatatccgataaaattaggaaggataaaagagtaaccgatggcgttcctcttccatttttttttctgttttcctgtcattttaatcaccattttccttattttaaggcgcaaaaagagcgcccaaccctcgctgttacgttaatcagacgctctttgcttgttatcctaatactcttactgcatcacaatcctgtttctgccattagtcttctctggcttcctgtgccctctggttcatattggcgatgcctgtgtccacatcctcctcgccaatcataatcaggtcatgctcttcctccagcacctttctcacagctgccatcttggcatccagcggacggtccagtacccagctggtggtcttaagcgcgtcctgtccatcctcagggaatccggggattgctgccagcttgtcactgatggcctgggactctgctgccgggaagattccgttgtcagccagtacctgggcgccctcttcgccggtcacgaacttcacatactcccatgccagatccggcacatcggactttgcattgatggcaaccggtgtggtggaaccaaccgtagcgcctgcctttgtatcagccgggtgaggaatggcggtcacgccccagttaaagtcaaacttgcccgcgtccttatcctgtgtcagggttccgatgaaccatgaacccatgggaatcatggcgcactgctgctgctcaaatacgctgatataatggatgctgcctgtctttaagttggcatagctctgtaccacgccctcgtcctgcatccttaatgcctgctcataatacggctttaagaagctgtaatcctcactcataagggtgttcttgccatcctgtacggcccagttggacaccagcgcctgccaggtatggttgtgtgttccgtatacctttgcgctgccttcgccgcttgtcatcttcttagccagctcctcatactcatcccatgtcatgtctgcggaaggataaggaacccctgccttgtcaaataaatccttgttaaagtagagcatataccagtccttacggaaaggaagggtgtagctgctgccatccatctttaactggtcggcaacaccgttgtacatggtcaggtcgattccgtcctttgcaatatactcatccaggttcagaatctgtcccttgtccttcatggtaacctggttctctgtatcctttatgaaaatcacgtccgggtcagcatcgccgcctgccagcatgacagtcaccttgtttgcgtactcatcggaaggggcgtcaatatactccacttccacatccggatatttttccatgaatgcctttgtcacggaagtaaactgaggtgtagcgtcgttgtcccacacagatacggtcagtttctgcttttcccctgaggcagcccctttctctgtctccttgctgtcagcatcgccgcctgctgcttcgctgcctgccgccgtgctctcaggtgccgctgagcccttgtctgaggatgaactgccgcagcccgctgccatggttgccgccatggcggtcaccagagccaatgccactgttttctttaatctcataataaaaccctccttaaaatttgcatttcaaattctgatataactataccagaaccgattcccaaaccgaatcgacccaaatcatactttttgtaaaattttcagatgggttttattgttttatataaaattttcatgtttttacaattttttctgcttcaggcactgggcctcatattctttcggcgacatgcccgtaaccttcttaaacaccttgctgaaataaaaaggcgtatcaaagcccagcaaatccgatacctcgtacatcatatactggtggctggctatcagctcctttgccttctcaatcttgatggcggacacatagtttgtaaaggattcaccggactgcttcttaaaggcagtgctcagataaccctggcttatattcagcgcctcggctgcctgtcccagggtaatgcgctccttataatgctccatcacatactccctgaccatctccgcaatcttatccaccctggtatccctgcgccgctccagaatccccgaaaccgcctccttaaaccagttaatccactgtatgatctgccccagggtccccagccgtcccagcttttccataatattgacctcatagggaaaatccggctcctccccgtcctcaaagaaggaggacaggaaaaaatacagattggcgcaggcattgaccgcctgctgcctggaaggattatgctcccttagcagacatgccacctggtccagtatctcctccaggcgtccgctgtcatttaaagccactgcctgggacagatcctttttcaggaatccgatgtggaagcttcccgtatgcctggcgctggtctcgcattcctcggaatagaataccaccgggtccagagagtgataaaaataatggttggtggcgctcatggcctcgtacagaagggctccgaactctcccaggctctccttcctgctgctgacagccacggacacagacacttcaaaataatccttaaccacggatatgattttctccccaaggctgcgtatctgttccctgtagtcctctattccatctgtggacatcactaacaccagactgttcagttcccggcgcaccaggcagctgtggtcaaaataccccttcaccatctgttcgatgatattttccgcaaaggaaatgacctttttctgatcctcccttgtaaaatcagaggagaatccttcatatccgtagttaaagctgataatggccagcaccggccgcctcagacacgaatcgtacccctccccctgattttgtgcgctggcttcacctgcattaccggagctggctcctccgctaaatgttcctccatctgtcagaagcttttcgatgtatcccctgacagcctcttccctggaaacagtcacagccgtacccgccgcctctgccttgcgcttcatctcccgccgttccatggcaagccttaagctgtccgccagcttttcctctgtcagctccatctttaccagatactccacggcacccagggacaatgcctgtctggccaggctgaattcctccagattggtcagcaggataaaaatcacatcatcccatccccgttccttcacagccttcataaacccgattccgtccattccaggcatcttgatatccgttatcacaatatcaggcttctgttcctccataagctttagagcctgctggccgtttgcggccttcccggaaatctcacatccatactctttccaatcaagaagggatgcgatacccgccagaatcaacggctcatcatccactatcatcacacgatacatctgtctcttccccttacctgttttatctggattcaccttcgcattcatattcaagcggcatttttatggtgatttctgtaaattccccttcctggctctcaatcgtaaggccgtattcctctccatagttaagcttgatacgccggtccacattgggaaggccgattccgctcatggagctgccctttaccttttccgtatggttcagaatcgaggccatcttttcccgcgcaattcccacgccgttatccctcaccttgatgatgaacacatccccttccctgtaagcatggattaagatggtgccgtgctttcctcccggttcaattccattgaaaatagcgttctccaccaggggctgaagggtaagcttgatgaccagggcctcataaagctccggctcatccacccggacctccaggtcgaagagctccacatacttcaccttttcgatggtgacataatcccccaggaaatccagttccttctgcagggtcaccttttcattgaatcccttggccatattcttaagcaggccggacagggccgtaaccatcttgacaatcccgctgttcttctgtatgacggcaatccaccgtatggaatccagggtattgtagagaaaatggggattgatttgggcctgaagcattttcagctccaaatcccccttctccttctcatgttccagccgctccgccatcagggtatcaatccgctccgacatgtcatttacaaccttgcccacggtgccgatttcatcctccccctctatgtccgggtccctggtgaaatttcccgcagccacatggccgatgtgtctgaccagccggtcaatgggctttttaatctgattggtaatcagcaccgacagaataaatccgaaaatcaggcaggccgcaaacatgatgatgacggtctgtataatcatgagcctgtcattactgagactgtccagggtaatggtctcatagaccatgacgccgctgcggtcatattgttcaaaggccaccaggctgttcctgccgtgaatcttcatctccagcagccccttgtcctgccccgactgctgcagctgcctgattaccctgtcattttcctcccgatggtcctccggttcatagagggaggcaatgcgttttccctcactggtcaccaccacggcctcctggcctcccgaggtatccttaagcacatcctgaaacagatccgtggacaggcagagcaccacccatcctcccggaaccgccctgcttccggtcagtgtcctggcaatgggcaggacctgtccttcatgctggaaaaagggagagtccaccaaatccagctcatagctgtccatggtcttatccagctcccggtccagccatcccccatccagaatcccctttgcatcatccgtgcttccaaaggaagaaccggtctgcaccatccctccccggtcatcaaacacggacagcttcacaatataatccccatactccgaaatagcgcagtaatccttgataagctccgcgtaatccagccccttcttcctggccccgggcgtaagtccccgcccgatttcccccaggttaaaggtctttctctccgtacagttgaggacaatgttaatcatttcctcgtaggccagctgataccggtaggatatactctccacatgatgctgcagcgagttcttggccacctccagcgttttcctgctggccgtaatataggtacaaacactgacaaatatggctataacccagataataaaaaagttataccggatcagccgggaccgcagcgtcttcccccaaatcagctctctcataatacctcccgtaaaatcacccaatgactctattataaaccatccggctgccgggcacaatccgctgcggctatatttcgcctcaaagccgtctggacagcttcggattcccccatcccgcccccgccacgcatggcgcccaggatggataccacggtccggcgcggagcgggaagctcttcccggtgaagggcgctctccagttcctggggtgtatatgggatggctgaaaaataaaatggcttttcttccatggaaatctccagacagtggcttctttggcctgccgcgccggattcacctgcaaacgccgtgcctgccccgtccgccggcccatacagcttaacccagtgtgtatccgcatggcagccatactcctgaggcaccagataatcaaaaagagtgctggaaaaggaaaaaagcaataaacaggccgtaagggcactttaaagtaccctggtgaaaaaaatgtgccttcttgtgcttttcaggcaatcctcttatacttgcagtgtaaagaaaacacaaacagcatctattcacacagcactcattaaagaagggaagaagaaaatgcacaattttcagtattacacacctacaaaagtggtttttggaaaggacacggaaaaacagaccggatctcttgtaaaggagcagggaggcaaaaaggtcctgatccactacggaggcggaagcgtgatacgttccggtcttcttgacagggttaaggcttcactggcggccgaacacatggattttgtggaattgggaggcgctgtgcccaatcccaggctgggtctggtctatgaaggcattgaattatgtaaaaaagagggcgttgatttcatcctggccgttggaggcggaagcgccatcgactccgcaaaggcaatcggttatggagcggtgaatgagggcgatgtatgggatttttatgactataagcgccagccgtcccactgcctccccatcggcgttgtcctgaccattgccgccaccggcagcgagatgagcgattcctctgtcatcaccaaggaagacggatggatcaaacgcggctacagcaatgacctcagccgccccagatttgcagtcatgaacccggatctcacaaaaacacttcctgattaccagacagcctgcgggtgtacggatatcctcatgcacaccatggagcggtacttcacaaacggcggcaacatggaaataacggacagtatggcggaagcactgatgcgcaccgtcattaaaaatgcaaaaatccttgcggaggatcccctgaactacgatgcccgcgcagaaattttatgggccggcagcctttcccacaatggacttaccggctgcggaaatgccgggggtgactttgcctcccatgcattggagcatgaaatcggcggactgtttgatgttgcccatggagccggactggctgcaatctggggaagctgggcaagatatgtctataaaaactgcctgccccggttccaccgctttgccgtcaatgtaatgggaattgaggacctcggcgcacctgatgatacagcccttaagggcatctgcgcaatggaggacttttaccgcgccatccatatgcccacctccttgcaggagctgggaatcgcgcccacggacggggatttaaagacaatggcccgcaaatgcgcggtggcgtccggcgggcagaaaggctctgccatggttcttcatgaagatgatatgctggcaatatacagaatggcggaccatggacctgaaaagactgccgcacattaggacaggaaggagtatcctatgcactatgtacaattgaaccaggggaataaaattccccagttaggcctgggtgtctatcaaaccgcagacggacagcagaccatggacgctgtttgctgggcgctggaggccggatacaggcacatcgacactgcaaagatatatggaaatgaaaaaagcgtgggagacgcaattcgtgaaagcaaaattccccgccagcagattttccttaccacaaagctgtggaatgatgatatacgggccggacggacagaggaagcatttaatgaaagcctggccgcccttcagacagattacatcgacctttacctgattcattggcctgcagagggtttcaccgaggcctggactgccatggagaagctctataaacaaggcagaataagggccatcggggtcagcaatttccacaaatgccatttggatgaactggagaagagggcagacgtcatgcctgccgtcaatcaggtggaatcccatccctactttaataataatgaactgattgattattgtttcagccgcgatattgccgtggaagtatggagtcccctgggggggaccggcggaaatttgcttcaggatgaaacgctggtccggttggcacaaaaatacggcaggacaccggcccagattgtcctgcgctggaatatccagagaaatgtggtagtcattcccaaatccacacaccgggagcggattgtctccaaccagtctattttcgattttgaattatccgaccaggacatggaagcagtctcccgcttaaaccgcgcagccagggttggggcggatccggagcattttaatttctagtaccatcaaaaacaggcccctggcctaacaaatcacaagcaaaaaaggggggcaacccgtccgcaggtttctccccctattgctgcttatcacgttccctctcgccctttcctctcctttcctccccgttcttccccctttcttccatttcttacccatgctctcccttccgctttctgccaaccttcatttcaggcgcattcatcttacagacaagtatagtgcagacaggcaaaaaatctgatataataaacacagttccttaaaacacttaaaggaggcgtcacgaatgccagacataaaaattgtttccagcgaaatagaggtgactctcaaggtcatcggcgggaaatggaagccgctgattctgcactacctgcagtacgggggtgtaaaacgttataatgaaatcctgcgttatctgggaaccgcccccaaaaagacgctgaccgcgcagctgagagaattagaggaggatggaattattgaccggacagtcattcccacgcttcctgtccaggttgaatattccataacagaacacggaaagacactttttccgattctcagcctcatgtgtgactggggatataaaaatatgggggaccgctaccagctgacgcatcctacctgcggttgtgaggatgaggaataatagagaccatacctttcaaaacttcaacaatattccaaaaggacggtatatcatgagctctaatgaatcagaaaacgaacgatacgaaatgctggtgaacggggacatacacaaggttatcccgcggcttgccgtccccaccatcatcagcatgatggtcagcgccatctacaacatggcagatacattttttgtgagccagcttggcaccagcgcctccggcgctgtgggcatcatattctcagccatggccatcatccaggccctgtcctttaccatcggcatgggcagcggcaactacatggcccggtgtctgggcgccggacgccatgaggacggggaacgcgctgtctctgtcgcgtttttcaccggcttcctcctgggtacctgtctgggcgttttctgcctgttccacattgaccaggttgtgatgcttctgggcgccacggaaaccatcaagccctatgcagtggaatatgcccgctatattttcctggccacgccttttatgatgtgttcctttatcatgaacaacctgctgcggctccagggcctggctgcctttgccatggtgggaatcaccgccggcggcatccttaacattgccctggaccccatcttcatcttcggccttggtctgggcacatccggggctgccattgccaccggcctgtcccagtttatcagtttctgcattctcctcgcccagtgcaacctgcgcagggagtgtatccatatccgcatcggcaatttccgtccctcccttttcctttacggcaagatcttaagcggaggccttccctccctgacccgccagggtatggccagcatagcgactattgtgttaaataccacggcccacccatttggcgacgcggccatcgcagccatggccattgtgaaccgcctgatctacttcgtcaactcagccgtcatcggcttcggccaggggttccagcccgtgtgcggattttcctacggcgccagaaaatacagccgggtccgccaggcctactggttctgcgtgaaatttaccacctgcatactggttgtggtgtgcgcgggcggcttcctggtctccggtcatgtaatcagcctgttccggaaaaacgatcctgaagtcattgccatcggcacgctggccctgcgcctgcagatagccaccatgtggatgaacggatttctgaccatgagcaacatgatgtcccagtccatcggctacggattccgcgccacccttctggctatctcgcgccagggtctgttcctcattccggtgcttctcatcgctgcccatttcctgggccttttgggcatccagctggcccagcccgttgccgacatcgcaactctggttctcaccttagtcataatccggggcatattcagggaatttaacaagttagagggcctctaaatcgccgtccaatgtgttctacatcctggaatttatcatatatttttaataattcccatctccaggagcgtttatgaatcactcattgaccgcatcctcccctgtctccaagcgcttgtcacccaggaaaatggccttcatcaccgggaccctactcctgacctccaccgggttcatatgcaggatactgggattcttctaccgaatcttcatgtccaggaccatcggcgccgagggactggggatttacaatatggtgcaccccatattcagtatctgtttcgctgtctgcgcaggctccatccagaccgccctgtcgcagtacgtggctgccaaccagaccaggggcagggccgtattcaggacgggtctggtcattgccatgggcatgtcctttctcctggcctgggtcatctatggaaatgccggtttcctggcagaaaagcttctgctggaaccaagatgcgccccctatctgccggtgatggcagtgtctgttccctttgcagccctccacgcctgtatcaacggttactactacggcatgcagaaagcccgtgtccccgccttttcccaggtggcggagcaggtcatacgcatgggcgccgtgttcctcatcgccagcatctggctggaatccggacgccagattacggtaagcctggctgtatacggacacctgattggtgagatggcatctgccgtgttcactgtgttctgccttggcttcttcccgccctgcaaagacggggattcccgccgcgctccggccatccccctttcctttggcgccactgcggccccccttatggctctggcccttccccttatgggaaaccgtctgatattaaatgtcctgggaagcgcggaagccatatggatccccaacaggctgatgagctccggcctcacaaactcagaggccctgtccgtatacggcgtgctgaccagcatggccctgcccttcatcctgtttccctctgccatcaccaactccatggccgtgctcctgctgcccacggtggccgaagcccaggccgacggcaacgaggcccgtatttcctccatgatatccatgtccctgcgctacagctgctatatgggtgtgctgtgcatcggcatatttaccatctttgggaaccagctgggcgtcagcgtattccacgatcagaatgcaggtacatatatcaccatcctgtcatggctgtgcccctttatgtacctggccactaccatgggaagcatcttaaacggtcttggcaggacttcatccacctttttccagaatgtgtttgccatggtcatacggctggcgtttgtactctttgccattcccagatacggtatcctgggatacctgtggggcatgctggtcagtgaactggccctggccctcatgagcttcctggcggtaaagcgactggtacccttttgctgggataccgtcaacatgatagttaaacccgtgctccttttactgatttccattggcatgtacctggcattttcccagtcctgcttctggcttaaggagcttcccctctttatcatgacagccgtgcagattctgttcctgagcttcagctacatgggacttctgctcctgttccacaaaaagcggcccctgccttaaacagggaccgctcttttcttgctttgccgcccatatattaacgtaagcgtacttacgtgttatatttttccacataatagctgaggatgtccgtcaatatataggattcatatatctcgaatacagtttcattatcatggtacaggcaaaatgaggcagcgttgattctgagcaagggctggttctgctctgtctccagatatccgtagatttcactgcttcccactgtggcgtttaaaatctggcgcgcctttgtgaaggagagctggtaaaaggatttaagcacttcatacagggagttgcggttgaaatcaaataactccagcttgggaaacagcttccttgggaggatagaggtattgatacagtagggcctgccgtccgcataataaatgctcttgatgacatagacctcctccccttcctccaaacccatccttcgccttatatccgcgtctgcttcctccaccttcagtgacagcagctttttggacggcgtctttccctgatggagaatggcctcggtaaagctgtagatacgcgacagcccctccgagccatggtccctgacaaagcttccttttcccttgattcggtagagcagcccctcatgaaccagctcgtctatggccttcctgactgtaatcctgcttaccccataggatgcgcacagttcattttccgacggaatgacctggttgggcctgtattccatgctctcgattttatgtatgatatcctgcctgatctgctcatatttggctaatttctctctcataataacctcaatccgctctctttttgtttttatcattatatactgagagcgacattctttcaacttattggagagagaaaagggttcattccgctgttttctgcgatattttcctccagttcatgtatccgtagagggaattcagcagattcactgttttcattacaatgataagcagggccgtggtgtcccctgatacaaacaccataatccacatgataatagacagagcgttgacaataacccacataagccactgctcggaataacgcagcagatagagcatactggctataacggataccactgtggtcagtgaatccatgaacgcaaaggaaccgcccatgtattttaacaattctgaatatccccagactcccacggctgtggctatggctacccctgccacaagcttaagcgtcatggtacggaatctgacctcgccgtcgctggttgcgttcttcttccacagatagatggccgtggcgctgaccggaatgctgtagagcacattgtacatgacctcgccgtacagcggaattcccagacactggtacgcgtacatggcgctgttgatgatggcaaaataaagtcctgccaccttgccctttgctcccagcaccaggttcaggctgcctgtaaggcttaagacaagcatgaacggcgtatccccgttgataaaccatatgacagtcatcagggaacacacgaaaatcagccagactttctcaaatatactccaatcacgaaagaactcttttatcttattcatttaaactccccctccacattcgtatgtttactgcacccgttcaggatatacggcgcaaaatcctgctgttcaaacatttccccggtcatcaccggcccctggatgctaacgattgccgaggccacccggttggcaagcctcacgcattgttccgtatccagccctttggagtacccggcaatcatggcagccacatggctgtcgcctgcacctatggtatcctttacctgtgttttataagcagggacctgcctcatcacgctgccgtcataatacatggtgccggaagctcccatggtgaccaccacaaggttatgattcaggccgtacaggtacttcaggcagtccgccacagacggctgctttgcgtaatcaaaggcttccttttcattgagatggagaatgggacccactgaaaggatgcgctccatcacagcctggtcaatgtcggttatgaccggtcccggggcaaagaaaacgcgtttttccttcatcctgtccttcgcgcccgccatccaatcggaaatgaccccgccgctggtaccgcacacctggtatccggccacatagatgctgtcgtaggcatactgggacagctgttcaaaccaggaaggcctgaagcgcccttccgcgcccttgaccgtgataaatgtgcgctctccatcctcctccaccaggcacaggcagtaaccgttgtccgactcctcttccctgataaggatttggtatcccagcttttccaaatcgcctgcgatcatatccccgtacatgccccttcccacaggcacgaaaaggtcgtggtccacgccaaagccccgcagcgtacctgccacgttgtaagcacatcctcccaccgcggacacggtttcgctgcacaggatatcctctccgcttttaggcagacgctttattttcatgataatatcaatgatggccgcacctattacaagggttttcatgcaaatctctcccttcccttttccagtatacggatgtaatggtcaaagtccgcatcattctgctgcctcagggtccggatgtattccggttttatccttcccatccctgtaaatgccccgcagacagcagtggccatggctccgatggtgtctgtgtcacctgccatgttggcacagagcaggcaggacaggtttggatcctgggcatagtatgccacggacagggcggcagggacagactcaataatacctaccccggtacccaccacatcgtagagcttatggataaatccctcatcatcccccttataggatccggcgatgtccagaccaatccttaagcgctctcccagccttggactgaaggtctcgcagcccatgccgtaaccaatctcctcaatcccaaacacatcctccattactttctcaaagtcatccttcacaatagccgaactcacagcctcggcaatcatggcagccccggctatggtcacatcactggtgtgtgtggctcttgacaccaggtagacatatctggcaatgtcctccttttgttccggccggaacaggcagccgatgggtgctatcctcatagcgcttccgttggacagcgccttatccgtaatcctggaatcctggatgttatccctgaaatttgccagggccaccttggaggtgggacccagaatattgttttcaaaggcattttccttctcagcccaggccagcatcctcagggcaatgtctctggtgtccggttcatagtcagtggactcaatggagtccagaagaacaagggcctggcccgtatcgtcggtgaactggcccttcttatagttgaacgccacatcattctcagccggtccgtccaagaatccctcaatccgtccaaaaaaggcctttactctctttcttccccacaactcggcaggcatccccatggcatcgcccagggccatcccgtaaagggctccggcaattttgtctctcatactgttacctcctggcaatttattattacatattgttattacaacttgtattgttatttgtattataatattatctgacattcctgtcaatataaaattacatttttatgcatatagctgtaaaataatactgtttttttcgctattattctatttttttgtatgatgtgtataattaaggtgagttctgttctctcctctctttccggctgccgcataaaaaagcaggccatacaggttagatccggtatccccgcagagtaaatttagtccggcagggcctgttttttcggctttttgccagccggccctctggttgactttcccttggtttcgagatatagtatttaaatggctatttttgaaatacgaaaggattgagatttatatggagaaaaacaaagaagcaaaagaggtggacctgggcacgggcagcgtggggaagcttctttttcagttggccctgccggccattacagcccaaatcatcaacgttctgtataatatggtggaccgtatgtatatcggccacctgcccggcgaaggcgccaacgcgcttacaggggtaggcgtcaccttcccggttatcatggcgatttccgcctttgccgccctggtaagcatgggcggcgctcccagggcatctatcatgctgggcaagggcaggaaggacgaagcagaaaacatcctgggcaactgtaccactgcccttataaccgtggccgttgtgctgactgccttcttccttatcttcggccgccgcatcctgctgatgttcggagccagcggcaataccatagagtacgggtgggcttacatgcagatttattccctgggaaccatttttgtacagctggcccttggacttaacgcctttatcaatgcccagggatatgccaagacaggtatgtacaccgtgctcatcggggccatatgcaacatcatcctggaccccattctcatgtttgtgtttcacatgggcgttcggggcgctgccctggccaccatcatatcccagggaatctccgctgcctgggttgtcctgttcctgatatcgaataagagctaccttaaaatacgcacctgcttcatgcggcccaaaagggaaattctcatgccggccattgcgctgggcgcggccccttttgtcatgcagttcacggaaagcatcctgaatatctgctttaatacctccctcttaaagtacgggggagatgtggcagtaggggccatgaccatcatgggaagcgtgatgcagttctccctactgccccttcagggactgacccagggcgcccagcccattatcagctttaactacggcgccaaaaagctggaccgcgtaagcaggaccttccggctgcttctgacctcatgtatgacctactcaaccgtactttgggctgtggccatgtttgtgcccatggtgtatatccgcatctttacccaggatgcagccctgacagccttcagcgagtggtccatccgcatctatatggccgcgtccctgctctttggagcccagctggcatgccagcagacctttatcgccatcggagacagcaaaacctccctgttcctggctctgctgcggaaggtcatcctgctgataccgctgatttacgttctgcccaacctctttgaaaacaaagtgtttgcggtattcgtggcagaacccattgccgataccatagccgtatgcaccacggtaacactgttccttctttccttccggaaaatgaaacgggagctgggagccaatgcctgattgtatccgcatctgacggacagagccggatatcctatatcaaaagacaccccaaagcctttttatcagctttggggtgttccatatctacacctgatcgtaaatcgtctgtaagaacttcacatcttcatgataccgctccctgctggaattctccaacagcatggcaatatggggcttcctctcctttacatgcctcataaggggttcataccggaaaaggccgtcacccacatggcggaacagctgttcctggccgtcaaagacaaaatcctttacatgaagggcgcctattcggtcgccgtaatatgcaaaagccctgtcaataacctctttctgtgcctccggctccgcctgttcggggtggatcaggttcacggcatccagtatcacctccacattgggggaatcaatgtcctccaggaaccgcttcatccgggcagggctgtacagcgtgtggttaaatacaccctccacacctacaataactcccagcttctcagccgcagccacgatctccctcatgctccttaaaagcagctggtaggcgtcctctgtataggattcctctgtgaccctgaaatccggatccaggcgtcctgtctcagttcccaccatatcagcccctatgattctggcatatttcatatgttcgatgaaacgcgccacctctgcctgacgtctggattcaatgggattgacaggattgatatagcagcccagcacagccacatggatttggttcttctccagctcccgggcaatggtccgggcaaaaccggagctgtaatggcctgcggtaaaatcataatcgctgatggactttccgaatgccagctggatttgacggatatcatgttcccttacctgggcaaacagcttctccatttccatcttcggacataaatcatggcatctcatgcctgtattcagtttcatggacccttctcctttgcaaacgttttcaagtcctattttaccacggttattcccggcctgccagtcctttcccgtctttttgattttttttaccggctttttccttcatataggcatccatggcatccgccacggtcttggaataggccactgcctccaccacggtcttggctcccagaaccacatcgccggaggcaaagattccctccactgttgtctccccctgttcgtccgtctgcagaaggccgtttctggtggccttcagcccctctgtggtattgaccagcttgctctttggcccctggctgatggaaataataacagagtcagcgtaaacctgctctttttccccggaataccccgtcacattgccttcctcatcatacagtatctgctgaaatacaggcccgttgtcattgatttccacaatattcctgctgaactcaaatttagctccgtccagcatggcatactgcgtctcatgaaggctggcgtccgaatggcttcccctggcgtagagggtcacatggtgggacccttttcggatgacggtcctggccacgtccatggcggaattgcccactccgatgacagccaccctgtcccctaagtcgtaggcatccggattagccaggtaatcaatggcaaaatgcacatttcccagggattctcccttgattcccagcttcttgggacgccatacgccggtgccgatgaagatgctctcatatccgtcccggaacaggtccttgatttccagagcccctcctatggtggtattgggacgaatcctgattcccatggacagaagctttttcttatagcgctccagtatcgccttgggcagacggaattccggtatgccgtactgcagtacgccgccaatcttgtccctggagtcaaagatggttacactgtaccccttctttgtcagaaggatggcgattgtgatacccgcaggccccgccccgataacagccacctttttcccgttctttggctggcactggacgtcaatacgctccaggcatgtgtccgatatataattctctatgctgctcacatgaaccggctgccccttccttcccaggacacagtggccctcgcattgccgctcatgattgcatacaagggaacacaccagtgacatggggttgttggaaaacagcatggcccctgcctcctccagtcccccctctttcagggccttaatcatggctggtatgggggtgtggattgggcatccctgctgacacatgggtttcttacactgaagacaacggttggcttcgtcgattacatgaactgccatggcatgattcctcctctaaactgctctcatctcatttttgcagccccaatcatagcacagccatacaggggaatcaacagagccggtgtactttttgcaaaacagcccgtcgcaaaattaacaggacaaaccggcaattctcagggactgttctgacctgcccggaccacctgacagcaaaatgcccccgggacaggttcatacctgaatcccgagggcattttgctgtaaacagagagagacaaccggtatctgtccctctctgctctcgttaaatgcttcacccgttaaataaataacttttaatcttctcctggcggctgccggtttttgctgccggtttctctgccggtttctgctgcctcttcctgctaccgctgtacggctgccctgcttcctctgaccacccggaacacgccggacatctccagcatcttggccacattgaaaaaaataaaggaatcaatgggccatttcactatgttctgtatgaccctgggaggcaggagtatcatgaatgcctgcccgtacaggatgctgagacacagggtattgagaatcacattgcacaccaggcaaaccagaaaatgggccgccagcaccctggtcagctttaatggtttcttataaaagaaaaacccgtaaatcaagccagccagcatggtcaccagggtcaggccgggaaagaaggcccccaccggcttgatgagatacttgatgatatccagcgcccccgcaaacagacagctgactgcggggccaaacagataggccactaattggttgggtatgccggaaaaaccgattctctgggtgttcgtcagttcgatgcggaaatttaccaggatgattgccgctgccgccagcatggcgcacacagtgatggtcctgacactcttaagctcccgggacgagctgccgaacagttctgctaatttcttcatgattcattacctcctttgcagatttcacggactacaaacggagatatacaatggcaggtgcaggaacctttcttcctggcatacaaaaaacggccccgaaaacccatccggtgcatcattatgcccggacatggcttccctgtgcgagaacgtgctgtatcattgattttcacacacgcttttggccggcgtaaaccggctgcacataaaacaggccgctccatctatctctgttgcagcgggatgcggcatatgtaccgcagacagtttccctttgggaatcctctttcgtccagctgacaactccctgtccagccggcacttaacgcacatatacctactctgcttctgtttttattgtaccttctactatacactatatatgaagatatgcaagcacttttttgacatcttcctccgcggcttattacggcgcttcccagtaataggtaccgttctccagggtacggatggcaaaatcctcatcatacaggtattccagacaggaaaaggtcttgcttatgaccatcttaagcttgatgaactcagactggtccctgggcacatggtctataccgtaagccagacacgccacctccttggtggtcatcctgtggtggccgtggtccaggatatgcttgatcaaatccgtcttatccagataggcaaagacaatccggtccaccacccgcttcacatcccggatgggctccttgtgagccggaagaatcaggcagtccacatactggtgcttcagcttttccagagagtcaaaataccccttaagcagatgctcgtcgggataggtggtgcccacaatgggcacaatgccgtcaatgacctggtccgcgcaaaaaagtatcttatggttccggtcgtacagccccatctgcccgtaggtatgtcccttaagccccactgtctccaggtcataatccccatagctcagaatccgtccctcactgaccggcgtatagggatatcccggaatctcgaattcccatcccctgttctcccggatcctttggtttacttccataaacatgttccatatctccggcgtatcatcctctgtcaccccgacgctttgcagcacctggggctggtcctccgtggatccatggctgtggttatagtacagacagtcatagcaatgcctgtcttcctggggattcatgaacagcctcgcgcctctggccgcatactcgctggccagaccgcagtggtcatgatgcttgtgggtcaggaatatatccagcctgtcataggtgattcccagttttcccagcgcctcttccatgacgtgcagacacgtcctgctgcgaaagcccgcgtccaccatcaggcttctctccccatcctttcccggaataaggaatatcttaatctcatcaatgcttttctgattgctgtgaagctccacttcaaaaattcccggagcgcgttccaacataacttccacctgtctttcattctgtcattctatagccatatccgttgtccggcctgccgccatgtcatggtttccctgacatccggtccgtttttttcatccgccttttcgctgttctcaccacggaccacgcgattacggttcccatgacaattcccgccagcacatccgttggaaaatgtacaaagagatacagcctggaaaacgcggtaagcaccgccaacatcagggccggaatcccccatttcctgttaaaaaggaagatgcagaccgctccctcaaagctcaccagggaatgccccgatggaaaggagaaatcctttggaacagcgaccagcagttccacggaaggatccagccagcagggacgctgcctggccgctatatttttaagcattacattgcccaggagaaatccggctgctatggatataagcatacatccgcctaatatcctggtcctgggaaatgaaaaaagcaggacacccataaggatccagaaccatccgtggtcgcccagagaggtaatgaacaccataagcccgtctaccaaaggcgtgcgaagttcctgcagtgtatataaaatctggaattcgataacgtccacctcatttccaggttaatatcccctgttcataccattatatcccacacagtattattttgcaatctgttaatattttaacaaaaaatgcgattttagtcaaaaaccttgcatttttataaatatgtgataaaatccctaacaaaataaaggctccggagcgtataaattccgatacattcctcagccccataaagggagaatatgagtatggcaaaatcaagtgtgaaagaattcctgaaacggaaaaatgtaaacatcacggtgcagacctatctgattgacgccctgggagccatggccttcggcctgtttgcttcccttctcatcggcaccatcttcggtaccctgggccagcagttccagatagaaattttcaatgtcattgccgactatgccaaaagcgctaccggcgcagccctgggcatcgccattgcccacgccttaaaggcacctcagctggtgctgttttccgctgccacggtaggcatcgcgggcaatgccctgggaggtcctgtgggcgccctggtcgccaccattgtggcggctgaactgggcaagattgtatccaaggaaacacgtcttgatatcatcgtaacgcccggcatcaccattatctccggtgtgctggtggcccagttcgtaggaccaggcgtggccgggttcatgaactggttcggaaatctggtaaagacagccacggaaatgcagcccttcatcatggggatcctggtgtcagcccttatcggcattgccctgacccttcccatcagcagcgctgctatctgcattgccctgtccttggacggactggccggaggtgctgccacagccggctgctgcgcccagatgattggatttgccgttatgagctaccgcgaaaataaaatcggcggactgatggcccagggcctgggcaccagtatgctgcagatgggcaatattgtactcaatccccgtatctggatacctcccacactggcatccatgattaccggccccatagccaccatggtcttccgcctggaaaacatcccggccgggtccggcatgggtacctgcgggctggtaggccccatcggcgtatatacggccatgggcggcggaaccagtatgtgggtgggcatccttctggtgtgcttcctgcttcctgctgtgctgacctttgtgtttggggaggtactgcgcaggatgggatggataaaggatggggatttgaagttggatttgtaaggtggaaggtacgcggacgggggatttgagtcgggaaaaggcgtggggacgggcggggaggtttggctcatggttccctctcctggctaagagactgtaatccctcggtaaaattccccaaaactccccgcccgtccccacaccttttccagcttattctttctcatgtccgctggcgcttccacgcttgcgggtgggattaaatagggcttggtttattttcattatatgcttttggggcaggtgtagcgggggagggtttgggtgtgttttccgtattcgatggcttggcttggacagcggtttatgcaggccatgcagtgggtgcagttttttccccagaccggggttccgtttgtcagacggatgttgtttagggggcagataacggcgcatttgccgcaggatgtgcaggcgctggttgcctggaactttttggcgtggacgaacattgggtaaaagaggatgtttactatgctgctgttgattttgtcttttcgtgttatgggaagctgggggaatggcctgctgtccttgatttgccgggcggcttcgtctattgccctcagggaaccgcggattattctggctgcttcttcctgggtgggagtggcgaacatggcaatgtagttttcaggcatgattatctgggcgcagcccgcatagttgaggccttttgcgtcagttagcttttttaggtatctgcctgcgtttccaatgtttccgccgcaggtcattacgaagtatatggtcctgtttccggttagttctgttttttccagccattcctgcagaatgcggggaattctccacgcataggtgggggcggccacaacccacggggtgtctgagtgtatgcttgaaaagtcgcggctgcgtattttctctcccagattcatgatattgtcgtctgtctcttctctgattcttttcgcggtgtattcactgtttcctgttcctgaaaaatatagaatcatggctgttgtctccttctgcctttatggctgttggctgatatgctgtacgcttgtgcggataaggctggttaaacgggctgtctctttctgttgggtttcgtctgcgcttacatcgtggttgttagttcattaaccattatagcggacagagggcatgaatacaacattggtaaaaaaattcattaccagccatgttcttttggggagagtatggaaaagacggactatcggcatacagctgatggtccgtcttttgcgtcacggcagtttgattgatttggttgaatccatgattctctgaagctcggaaagatcggtgaccactccctgaaggtattccctgtcttcgtaaatcaggtagttggtctggtccataatccagatgtagccccgtgagctttgcatgcggtaaaccatgatgccgcagcttacctggcaggccaggcagtctacctctccggtgactctccggcggtcctccggatgtatcatgttgataaatttgttgtcaaacagatcctttatctgctgccggctgtaaccaaatatctcaaggaaacggctgctaatataagtgaagtcaaagtcctttgtcctggcgcagcggtggtatccgccgggcatgtcgttgttgagaatgtttaactctgcattttccctggccagagcgctgttgcgctcccttaacaggcgctgggcttccatgctctcggagatgtccgtgcatgcgctgatgatggccagacggccgtcctccgcctcgatgacacggcccttgtccagggtccagaaccaggtgccgtccttcttgggcatgcggtaggtggtggtgtattccaggccggtgtaatatcgcgggcctatgtctgccgccacccgctgccggtcatcaggatggatggtattgaccacctttccccggattgcctctgacagctcctcaaaggtttcatagcccagcagctttaccatctcatgattggcaaaatacagcggaaatccttcctcgcagtagcctcctatcatgcctccgggcgtcatctgggcaaagatggcggctgcggccctgcggttctcttcggtcagcgtcatgaaggactcgtccttttctgatatatgtaccgcggatgacagggcgcgctgggaggcctccagctgctgctccctttgcttttgctgggatatgtcgcttatggccccgtagtaaagccagtggccgtcctgctccctgaggaagaataccctcagatgcatccacatggaggtgccgtccccccgccagctgcgcagttccccctccgccccctttataggattctgcctggcccggctgaatatttccatcacctggtcccggtcatcttcaaatacggtgcccagaatggttttgcgcacctcctccaggtccatgcctgtggtccgggtgacggaacagtactgctcattgacccgaagcagctccagccttccatcgtataggtcgtaaaatgcaacagcgcccaatatgttgttcatcatggcatcgctcaccatgtccccgttcatcagctcctgaaggcggattcgctcaatctgtcgcgccttgattcccctgaagtcaatgttggcctcatctgacaggatctgctcaaaaacctcaatgggcatgggatggtagaaataatatccctgtccataggtgcagcccatatcctgaagcagctccatctgctctttgctctcaaccccctctgcaatcatacggatgcccacaatattggccatgcgggtgattgcctccaggattcccatgcccttacccacgctttcgtggtccatgtccagaaatttcatatcaattttcaggacatctacattcacatctttaagcatgttaagggaggagtaaccgctgccaaaatcatccatcagcacggtaaagcccgcggaccgcagttcctccaccacggctgttataaccttgtactcctccacataggcgctctccgtaatttcgatctctataagccttggatccaggcagtaacggctgatgagttcctggaatacacgggtcacgttcagggtatatatgtctatcctggatacgttgaccgatatggggaccggtttgcggccgctgtctatccatttctttacatttctacagacttcctcccagacatacagatccagctttgtcaccagaccattattctccaaaagcgggatgaacacccccggagctatgaggccccgctccgggtgattccagcgcaccagagattcaagccccacaatctttcctgtcctcatattgcacttgggctgggcatagaaggtaatctcgccgttttccagggcccgctgtatctcagagagaagcctgtggtcctcctccagcttctgcttcatgcggctgtcataccggctgaccctctgggcgtaattgcccttcacagacgacagggctataacagccaggtcgtacatattgctgacagcaaggcccccgccgtcaatgccatagatgccaaaggccggaaggaatccggctgtaccgccttgctccttcatatacctggttatctcctcctgcagcctgcgcaggacagcaggcgaatcaggtagaagtataacgaaatcgtctccgcccatatatccggcaaggccgccctcctccgactgcgtcttgttcagaagttctcctatcatggccagaaggcggtcccccgcctcctgtccgtaccagtcattaaaaagcttgaaatgctcaatatcaatagccataaggcagtaatcttcagaatttttcacatgtttaagaaaggcagccgactgcctgaaaaacaccggcctcctgcaaagtccggtaatgggatctaagccctcctctgtcaactgatttcccagggccaaggattcttccctgcgtttctgttcgtcgatgtcctggataaagcacatgacgatgtcctcgtcctcagcgccgcttaaaataggcaccacaatctgcgccacccagcaccaggttccatccaccttccgtttgcggaactcacctttaaggatacggcttgcgtgctggtccgacaggcacgatgcaatgcgccccggctcccagaattccaaaaaacgccgggcgtcctccgggtgaatcatatgttccgatacctcctgcaccatggagcttaaggttccctccggcgcaggaatcacatactttccttcctgatggtacagtatcttataatagtccatggtaaaattcaactcaaacaattcgtcataggcagaaatactggtaagattgtaaaagagattcttgttgccctcattgatttcccgcaccagaatcacccggcagggccccaggcccggccagtccatgttcccggaactcacctccacccactgctggatcgctttattataaaacatgacagccccgtccgaatcccgattcagcggacagccctggcagggccggtcctctccgcacagcttctcataacagacgtcaccgcagcgcacatccttaaaccgccgcttcagggcatcgttgaaatgcaccagcctgtaatccctgtctatgatatagatgcttgtcttctcactgcttcctttcgtactcatgcaagtacctcttttccgcacgcagcttttcattgaaatatattaattataatcttctttacctgtccccgtcaaccttatcgtaaaatgccggattaaaaataccgcaataaaataaggaaccattatcatggctcctcatttttcaggcggtggtttcaagatgtctcagtatatgcctcttatattccagaaattcttccgtaaggccgaaatccctgtccctgggctttgtctcttttatgataagttcctccgttatccttccgggcctgcctgtcagcaggtaaatccggtcggacagcaatatggcctcgtcaatgtcgtgggtaataaacagggtggacagatggatttcgtccatcaccttcagataccagttatggacggattttttggtcagcatatccagtgcggaaaatggctcatccaacagggccacgctgccggaaaacagatacgtccgaagcagagccgccctctggcgcatgcccccggacagctgggccggatactttttctgggtgccctccaggccgaactgccggaaatagggaaaggcagcctcccgtgcctccctcttcttcattccttttacaatcagaggaagggccacattgtcctctatggtccggtagggaaggagcaggtccttctgcagcatatagctcacccgcccggggcatccggttacgtcctctccgtccagaaggacatgccctgtgtccggccttgacagaccagcaataatgttaaaaagggtggtctttccgcctccgctgattcccagcagagacaccagctcccccttattcagggtgatggatatatccgccagcaccggctccccgtcaaaggattttgagattccctctacctttagttgctccatgttctcctcctggcacagcactgccgtccccggccttacggaaggtattcattggaacatcctgttcccgcctcaatgggcgtttccgtaagccctttttcattcagccatgcgtaatatgcatcccagcgctcctggtcaatatatccccattggggcgcatccgcctggtacttgtccgccaggtattcctggctggcttttaccagatccgggtccagctccggagctgccttgcacaggatctcccctgcctcacggggatgttctatcgcaaactcgtatcccctgctgacagcgtccagaaacgccctggctgtctccggctcctctgcgaggaatgtattgttggctatgataaccggcgtataaaaatcaaatacaggatccaagtccgcaaacgcaaagtagtcagtttccagaccttccagctctgtcttgactcctgcccatgcataaaaaatccatatggcatccacggattttgtcttcagcgccgtcacctcgtccgtcacggtgctgggaatgagttccaccttatcaaaatcccctccgtctgcttccatcacatccttaatggtcgccttttccacaggaaggtcccaggtggcatactttttcccctccagtccctttgggcggtccataccctcgccccttctggatataatgcccgatgtattgtgctgtatgacgcctgccacagctgtcaccggaaggggattatcccctgaaaacgccggcgccaggctgtcctggaaggacatcgcaaactgagcctttccggaggcagccagcacctctgccccgttttccggcggctgcacaatctccacctccaggccggcatccttaaaatagcccttttcccgggcaacatagatgcctgtgtggttggtgttaggcgtccagtccaggacaaatgtcagctttcttacatcctgtttcgccgcctggacaggggcggtattctctcctgaatccggagccttgccgcacccggtgagaagtacgcccaggcacagggaggccagcagcatacttgcgcacttatttttcattttcaatctctcctcttaatgaaacgccggatatctgttccatgttctatttctgtttttgactggtttcccatggcatacattttttctgaagcagttccacggcccacatcagaattaaactgatggccgatatcaggaaaatcaccgcgaacatcttgtcaaaggaaaatgccttcttaacccttgtcatgtatacgcccagtccgccaaatccgcccagccactcagaaatcacggctcccaccactgcataggaggctgatatcttgagactggaaaagaactggcccatggcacccggcagcttgatatagcaaaatatctggaaccggcccgctcccatggcctttagcaggttcacagcatccgggtccgctgccctgaatccggtgagcagccccaccgttatggggaaaaaagtggtaatcacaatgagtatgaccttgggagtcatttcatagccaaaccacagtaccagaagaggcgcaatggccacagccggcactgtctgggtcagtacaatgatgggataaaatgccttgtatgccttgtcaaaccggtccatcagcacggccgccccaaagcccgtggcaattcccaaaacaagtcccatccctgcctcggtcagtgtaatcctggcattctccataagggccgggaattcctttataaacgcctctgctacctggaccggtgagggcagcataaatccctccaccagaccaagggatacagaaagctgccacaggataaggatagagaagatggctgaaacagaccacagtttactggtgatgcttggtgactttcttttcaatggtaagcacatctccttcggggtggtaagaaaccttaatgtatgcagccactgagggcgcccctgccctgaccgcaatatgctggcactcttttacaatatccatcagctggtcataatccccttcaatggttgtctcaaagggacctacataatagtttaaccccgtactcttgatgtagtcgatgacctggtccacgatacggattaattcttcgtcatttgctgccttgggaagtgactggattgctacgcttgcgttcatattatttctccttttctcttcaaatcatacggaataaaaaatcccgtccggatagtccgggcgggataaaacttacaaaaattcacatcttctgcaggcttcctacgctggcattatccagatcaggtatcagggttcagaacatattccatctcagccggattccactccagcaccccttttcattgttgggacaagtatactacggctcattttaaaagtcaataggtactgctgcagctgtcatgcacacatttcagatatcccggaatgcccttaaacacgcctgggtggcggagcggtccaaaaccgcgtatacaatggtgtcaaagtcaccgggaaaatactgctccaaaagctccttccaccagcccgccaccttaaccggatcattgcggaacacgccgcatccgtaggcgcccagtatcaggtttcggcagccccgggaggcaaagatggcaagggccagcttcatgcggcgcttcatggactgctctgctaaagccctgtcttcccccttcaggatcacctgccccatattgacagccggaagggtgagcacagacgcttccacaggttccttaagcaggccaaaccttccgtcccggaaaaacaccacatccggcgaaaatatggcgtgatctgtataaatcatggtactgcatgcccggttcatcctataatacgtttcgtgggccgtaagtgttttatagaggcagctgctggcagccaggctttcctcctgggccatggctccgtttataaatccgccgcccggattcttggcgctggcaaaattaaggacagcgcatctgcactgattctctcctgccagcttaagaatggcatccactgtggaacaattccatgtacagcacttatattttgctgtttttttagtaaccgtctcatattgctccagcagccgctccccctgttccggcgtaaaaagcacgcttttcttcactgactcctgctggcgggctctgatttccaccacagttccctctgtctcataccagcccttttccataatgtccaatgtctgtcttgcaattgcttttctgtccatatcttaaaattcctcccatttcctcctgtaaaggcgcgaggggcggtggccttcccgttccgtaaaggaatcggtttcctccaccagagaagctatcttgcggcggaacgcaggcttcagaaggcatttgtccagaatcacttcatatacctgctgcagctgtgtcagggtaaattcctgcggcatcagatgcagggccaatcccgtgtattccacctttccgcgaagcctttccagggcgcaggatatgattctggcgtggtcaaatgccagcccccggttatccgttatcttatattccacggtctctgcctgtctgtttttcctggttatcttctcaattccggaacaaagtaccgtatcatccgtccataatttaagttcatagtgctgtatatgttccactgactccacctgcccggtatcctggctgcgcctgtaatcccggtgttcatcggtcagcctgtaggaaatgcggaaccatctggcattgtcggcgtcatcaccggcctgtatcgtaagccggctgcagtccaccaatgccatataggaacagctcatgacccaggttctgggatcccttcccggttcactgaacgtgtacagctgttccatatacccataatccagtccggtttcttctctcagctctcttctggctgcctgctccgttgtctcctccggtctcacaaaaccgcccggcagggcccagcatccaagatagggatgacctcccctctgaatcaggagaatgcttaggttcttttccggaagcttcctgtaattggattcctcctggtccgtcaccgtgaaaatggccatatccgccgccactgacgggcgggcataatgaccgggattgtagcttttcagaaactcttcttctgtcagaccgttcctgtcccgcagacagggagtgttttctttcttttctcccatatcagtccatcccctcctctttctcaagcagcaaatccctggcctctgtcagggcaaaccccagcaggttgctgcccttccatttcagcggacactctgcgtccgggttgttctttcccataccgattccccagatacggtcccttggactggcctccaccagaatccgtttcctggtggattttaaaaactcccacagctccggattctgggaaaattttgccatattccctttgcgcaccagttcatagcaggcggcatcccaggtttccttgtcaaaattcttcactgccctcccataggctttcatggcttttggctccctggcctccataatgttccccagcatgtccctgtcaccgaacattctggccttttccgccatcataaactgctctgcgcaggaataaactgtgccgtctgccgtgaagctgcatttccaccactggctcagacatgcttccgtgataagcccgtctgccgatggggtgtgtccccagaaaaataaaaatttaaaatgctggcctgcaatgtatgcttttttaagtgcttcccatgtatataccattgtgttttacctccctgtgaaaactgtgaaatccgtgtaatccgccattgtgctgcattgcagtaaatccctggggctgacattgtctgttgtcctcaggcagttattaccggatagatattattttacagttattatcttttaattattatctttttgataatatcataataaccagatattccagttttgtcaagaagaacattacccggaaatcacctgtgaatcacctgcaaacatttcctgggaatcatctgcaaacattacgcgaaaatcacatggtaatcccatatcggataaaataccggataaaataggggataaaagcagcctttgcatattggcatatctgcattcaccggccggcccgctgcgtctggctccggtccttttgatcaaaaaagggcctctgccctgcaaaagctgacagagaccaggcctttcttaagtcacggacaccgccccagagatgacggatgacgtataggcggcacaacgtattttctgcctacacctcaaaatcctctgagtgaaaattgctgtaaaaccttcctgagacagccctaaaacgcatcacacagtaatccgggtccgtgactcctcccggataatacatggtatctccttcacgccatatcatttccttgcttgcgctgtcctccagtatctccatggttccctttaacatggccccccggaagaagcgcctgtcgcagaaatagatacaggccttcggattctcacggtactgcgctgtatgtctggatgaggtattggtggtaaaatagaacacctttatcccctcccgtttccgcggcgccagcatggccttgacaacgggaaatccctcctcatccgccgctcctataaaggccacggtctgtttatccgccagattccctatggttgtttctgcatccctcatgaaaatgcctcctctcatattctcttcatatttcttcctgttacctctggaaatgcgcatactgccggtccccattccctcagccacactctaacatgaaagatgctctctgtaaattacacacttttttgtaaccatggggtaaggcgtgtctgatacccccttaatccagcaatccctttttgcgcaggaattcttcttttccgtcctccatcatcatctcgattccgattccctgcatgataaccactgcttccagcatcttagtccccctgctggtcagcgcgtattccacctttaaaggatatccctcataggatgtctttgacaccattccgtaatcacagagctcccttaactgttctatgagcattttctggctgattccctttatctcccgttttaaaccggccagggaatggggcccctggcctaactgccacaggatgatgggtttccattttcccttggtaatgtcatgggtcagttccaaaggacatgtgtactctgtcctcgtcttcatttttcttttcctccttttcccgtcttgtcctccaccagggaaatcaagggaaacatatcgttataatgtttctggatgaacattccgtttctctgcctgtacagccgggcagccagcttatccgcaatgggaaggattaaccgctcatgggtgcacagcataggcgccacctgtcggacgcttcctgtcacctgataattcaggcacccgcaggtgcaattgcagcgctgttttaccgcgcagccgctacattccggtttatctccccggctctgcgcatacagacgctgccttttggcctggtctatgccctcatccacagtgccgatggcatagcctctgtggcccgcaaactgcgtacagggatagagaacgccgtccggagccacggaaatctgctttaagcccagctcgcagcgctcatggcagtaggcatcccccttaatccagctggctatcttgacctcaaaaggactgaaatagaatttttcctccctgcaggtcatttcatagtaaaattccgcaagttcgctgtactgggatttcagctgacggacggatccattgtcccatgcccctgcatagttcaggctgcatataaaataccggaaacctttattccacaattcctttatccctctggcatactcgccaactgtctccgggcataccgtcatcataaccggcgcgtaaggatgggcggccagcagttcttcggtcacggactccagttcgtcatagcttccccttccgtccttatgccttcggaaaaagtcatgggcccttttcgttccatcatgggacagcgcgattaatatgcgtttttttctggaatagtccagaaattcacggtctaaaagtgttccgtttgtagttatcttaaaatggaatctggtattcagggcgttttccatgtcccggcaggcagcagctgtgcggtaaatcacatccctgcacagcaggggctccccgccgaagaatacgatgccgcaggaggactgccctttcccggctgccagaagagccgcctttttggcagtctccgccgtcatatagtccttctggtgacactcataacagtatccgcaggccaggttgcaggcattggtcaggtgaagcgtcacatgcatcagattaccccctgtcctttcagccaatccagaaaatcgcgcacctgggcgcgcagctcctcctctgattttgcccttgccctggcctcctgttccagcttggctccttcccagtcaaaggccctcccctgttcctctgcctttgccatggcgtcatacgcgccttccatatccacatcattacacgggtcataaaagattcccagagctatgtcaggtccataggaaaccagttcctccctcagctgttctgcggtgccctttgtatcatagagtgtaaaggtggccgcggcttcctcattctcctttctccattcatacacatcatcttgggagatgaattcaaatgctatcttattatctgcgtccgctccgtccagacataaatcaccgtccctgagggactgctttttctctgttttgccgctgaacagacggctctccggcagttttacatcctcaagcacaggcggggtgttccgggaaaatgtaatccctttgtagctttccgcctcggactttataatttcccaggcctcctcctctgacaggaaaaatggcgcggtcaccgctatacagccataggcgcctgtcccctccccgtggatgaatacaggagccaccaaccccttatgagcttctccgtcctctgttttgccccggtagtcctgacctgcacctcctgcccctgtatcttccggctccccaactcccggttccgtattcccaggtttcacacctcccggctccgtatctccccgggctgcgcatgcgcacaatgccagggacattcccagagccgtcagcaccacaccgttcccagaccatctgtgcggcactttttttagcagttcgggacgggatttcatgtcagccccggtgggatatccgggtttcttatagtaaacaacaggtgttactttcattctgccaaaatctcctttcctccccactccaccacggtgaagcccctgcgctcaaagggggccagctccggttcctccgcctggacaggctgctccagcggcatgtataccatgaataccctcagtatgctgtccggctttggcgatataagaagcccggccgtctcctcataggcttccttctggaatgtaatcaggttataaggattgccctccatcctgggcagccagtattcgatgaatgcttcatactccttttccttcagccccaaaaactccagcttttccctgagaaacgcctctgtcccgcttcccaaaaccacaaaccctttcgtcatgtcatacgctgtgcggtcttctccttcccagaacaaatagggatattccttcccgtcgttatgatccaccagtcttccatccggccaggccgtcaccttccatccatccccgtaggccggaatcgtgtccgtaagcctcccatcatagtccagcctgacactgacctcctgggcctgttccgggtacaggtaaatcaccggtttctcagccagcgtcaggtcgggcctgttgtccgcacagtaagacaacgccgccacacatactatgaccgctgccacacgccatctcattttcataatagtctcctccttgcatcaggtgcttccggttccccaaccgccctgatatctctgatgattctatggtagcacacatggggcctttgttcttttagtaattcttaatttcagttaaagcttttctgtcgtatggagaaagcagaggaattccgggcggagaccgcagaaaacagcccatacggacaaaagggattcccagcctttacagcctggaacccctttcatctccatgttgcagacaaatattatagatacatcctacttcttagcccgcctacttcttatcccgcttcttcacagtggggtaatgctctatcaaatcatgataccggaaacatccttccacatggtcattaatcaccccgcaggcctggagatgggagtaaaccgtgaccggacccaggtacttgaaaccgcgtttcctcaaatcctggctgagctgctgggacagggcgttctgggccgggatttttcccttttgatggcctgcgtagagaatggtctttcccccggaaaagccccatatgtacgagctgaatgagccgtattcctgcctgaccttctggaaacacctggcattatggataacagcctctacctttctgcgggatttaatcattccttcacaggacagaatccgttcaatatcctcctcttcatatgacgcaatcttgtcgtaatcaaacccgtcaaagcactgtctgaagatttcccgtttctgtatcatcatattccagttcagcccgcactgcataacttccatcatgagaaactcaaactgcctgtggtcatcatgaagagggacgccccattcttcatcgtggtatttcttcatcttttcattgcacagacaccatgtacatccatccatatgccccggacctcctgccgtatatccgctttcactgctgatgcatccaaccgtttcccaaccaatccctattttccaaatgcctcatccgcagccttccatgccccggcaatccggtcgcaccacgcatcaaactgcggatccggtgtctggctctccggatggtccatcatatagcggaccgagcttcgaatcccctctgccatggatacggtgcatacaaaatcaggcacagccctcttgatttttgtgttgtcaaacaggactgtacacgccttatcccccagaagctggcctgcaaaatcatattcctttccgtgctctgccagaaaatcagatgccacatgaagggcgttaagaggtctgtccaatgcctctgccagcgtttcataaatctggttccatgtcatggactcatcgctggtaatatggtaggcattgcctatggcatggggattgcccatcaggcccacataccccctggcaaaatcagcggaatgggtcagtgtccacagggaggtgccgtcccccggtatgataaccggctttccctccagtatccgctttaatatctgccagtttcccttatggccatgtatggctaccggcggctttttaccatcatatgtatggctggggcgcacaatcgttaccgggaatccattcttgcggtatgctgccgtaagcacctcctccgcatcaatctttttacgtgaatattcccagtaagggttgattaaaggcgtgctctccgttatgggacagcctgccgctggtttctggtacgcggacgcgctgctgataaagatatactgccttgtcttttcctggaagagccgtatgtcgcgttgcacgtcctccgccccatatgcaatgaactgggccaccacatcatatgtcctgccctccattatacgggccactgctgcctcgtcgtgaatgtccgcaaccatggactccatcccctccggcacaggtttggaacccctgttgagaagggtaacctcccatcctttctccatggccagcgctgccaccgctgtgctgatggttcctgttccccctataaataaagctttcattatgatacctccctgcctctgactaactgttactgcctaactgttactgtcttctgcttttatggcccaccgcattttcgtggaatgggcacggctgttcatcctgcactcctctgccgaaggacgtatcacatccccggcaacctggctgtaaaggcctgccctgtacatttccttaaatgatttcttcacaatcctgtcctcgccggagtgaaaggtcaggatggctgcccttcctcccggctttaatacgccgggaagcttgtccagaaattcatacaacacctcgaattcgctgttcacatcaatgcgcagggcctgaaatgtcctctggcaggacttcttcactgcctccttccgttcctcctccggaatgaacgccagcgccctgtctaccatctcatatagcctggtggtggtggcaacctcccttccccgcttgatttcacccataaccgtacgggcaatctcctctgcgtagggttcgtcggaattctccatgagcatgcctgttaattcctcctgggtaagacccttcagccgctctgatgcaggctctcccttaagagggtccagacgcaggtccagggggccttctttcttaaaagaaaagcctctggacggattatcaatctgcatggatgacacgcctaaatctgccagcacaaaatccagcggcccgaattctccggctatctggtctatattggcaaagttcagtttccggatggtgagtatctccggcccatagcccatatgttcaagccgctgcctggtcttttccatctcgatggaatccacatccagggcatagatatggccctttgactccaggcgctccagcatcctgctggtatggcccccgtatcccagggtggcgtccaggccagtctggcccggctgtatctgaaggaactccagtatctcatttaccatgatagggatatgcatacccacaggggtgcttcccttctggatgacctttgccacggtttccgggtacttttccggctggagctccttatatttttcctcgtaacgtttgggatgcgttcccttgtagcgcacacggcgctgatgcttctggccttcctgttccatgtctttactctcctctgtcccttcgatattctctttcaagctcctcccagtacctggtatcctcctctgtaacaggccggaggacacggcaggggttcccggccgcaatgacgccggatggaatgtccttcgtaaccacggaacctgaaccaatgaccacattgtccccaatggtgactccgggattgatgacggtatttcctcccacccacacatcattcccaatcactaccttctttccgtattccagctgtctgcggcgtactccggcgtcgatgggatgccctgcggtatagatacaaaccctgggggcgaggaatacattatctccgatggtcacatcacatacatccagaatgatacagtcaaaattggcatagaaattttcacccacagaaatatggcagccgtagtcgcagtgaaaaggcggctccacccataaattttcccctgtcctgccaaacagttccttaaaaagctgcaccctgtactccgcctgttcttccgtggtcccattaatcagacggaccagccgcctggacctggcacagtctgctgcaagcgcctcatccattggtatataaagcttttccgacaacatccgttctttttcagtcataatcttctgcattccctcctctcccgcttatccctaccattataccaagcataccggcagggatgcaatacgtgatggaaggaaatctgtttcctgaaatctggttctttaaatctgttcctttaaatctgttccttatggaataactgctgcgattcttcccctgccgtcttaaacagccggatggaccctgtctcattcagatagcgcagcagggacaggccaatgggaaatccgaataatcccagtacccccaaaagctgcgctcccacaaacatgctcaccagcgtcaccaccgggtgaaggccaatctggctccctacaattttaggctctatgatattgcgcacaaccgttatgaccagatacaccaccagaagccccagtgccaggccgtggctgcccataagggcagtgatgaccgtccacgggatcatgattccccctgtccccagcacgggaagaatgtcaaatacagcgataagaaacgcaataaccagtgaattctccaccccaataagcgtcagtccaatggacagttccacaaaggtaatggtcataatcagggcataggagcggatacacacaaaaagggtgcccaccacataggactgtatctccataaatacctccttgggccgttcccccagctgccgcagacagaatccggtcagcagttcataatcagccgcaatgaaaaaggtggtaatgaccatgagcagcagattgataaacataccaggaagggatgaggcgaagccggaaagccatcccatgactgacatggagattcctgataccatctgtcccgcggactgcacaaaatgtccctccagttcctctaaggccccaaggagagacgggtccatccgcagaagatattgttcgatgcctccgaaaatcccggtaaacacaggttccgcataattggcataaaccgacggcagacttgccaccaacgatttcccgttggaaaacatcttgacgcagagaagggtaaacagcagcccagccacactgtagaacaggagcaccataagaatagctgtaatcttcctgttcatgtgcagacggactgacgcaaagcagattggcctccttaacagatacgcgattacaaacgcagtgacaaagggggccaccatgggcagcccgtatttcagcagtacaaaggctgccagcagcaggattgtaaagtacatgcagttaatgataaatatttttctcgcttcggtcttcattattcttcctttctgtccggacaggaataacatccatgaacggcgcaccttttatgggcaagccggtaaaaaacaaaaagacacggcctgcgcccaattgtgcgcaagccatgccttatcccacttatgtggtgaattgtatcgaagtatctatgcttcggggcagtgccgccgaattcgtcatccatggaatccgtcttctcctcatgtaattctgtttacggcctattatattggataaaccgggattacacaaggggatggcccattctttaacaaacttttaatccggacttttattctgtatggttccgggctggaacgtccaggtaccggtgcatgatttccagcagacggctgatttccagcggcttggttacatgctcatccattcccgcctgtttggcccggtacacgtcgtcggcaaatgcgtttgccgtaagggcgataatgggaatcccagtcccgtccggccgcctgccggtctttcccaggctgcggatagcgctggcagccgtgtaaccgtccataaccggcatctgtatatccatgaggataagggcgtaggtcccgggcgggtctgtctcaaaccgttccacggcctcccggccgttgacagcgcatacagccgtgatgttgaacatagccaacagctccaccacgatttcacggttcagctcattgtcctctgcaagcagcacacatgttccgggcggaaatgaagccggggtcctgggggtatttccgttctgggaccgttctccggtttcttcctccccggcaagtttcagatatatggtggcaatgaaccgggttcccctgttcagctggctttccacccggatggtgccgttcatcatctgcaccagattcctggttatggccagccccagtcccgttccctggacctggctgacccgggaatcctcagcccgttcaaagggcatgaacagcttttccaggaattccggggccatgccgattccgtcgtcctccaccacaaactcaaagcatcccaccccgctttcactggaaagcttctcttccagggatacggctatatgccccctgtcagaggtgtacttcacggcgttggacagcagattaatgagaatctgtttgacccggaccgcgtccccatatacggcatggtggtctatctcttttaagctgatggacagttcctgtcctttgctgtccatatccggttttacgataagggatacctcctccaccaattcctccaggcagaaggcatcttcgctcagtcccacattgccggactctattttcgacatgtccagcaccttattgattaaatccagaaggtggctgcccgagagactgattttagacagacagtcctctatcttatcacggttgttaagattgctctgggctatggcagtcatgcccatgattgcattcatgggcgtgcggatgtcgtggctcatcctggaaagaaaatccgactttgcctggttggcccggttcagtgaatcatacgcctcctccagggcgtgctttgccttcttctcctcatcataatactccaattcccgctgtttctcggcgctgatgttgcgcagggctataatagccgtcctgggcctgccctccttggaggcaaccatgtggacctccagacgcagccacagaggagagaagccgtgcctgaactccacctcaatgtgttcgtttcctccggccagttcccccagaagccattcacgctcacagatggacatcacccgttttctgtccgcctggtccacatcggacaggatatagctgcaaagctctgtggagtagcacccgttcctcggcagcaccgccccaccgcgcgcctccggcagccttaccgcataatagctgtcctccggcaggttcacatagaaaatactcatatacacgccattgatggcctgaagcgctgactggctcatatacagccgctcactattctctgacagttttgatttcatggaatggatattgtggagcgcgcccaccacccggctgggcttcccattctccatcatcagcctgctgttgaccctgtgccatatataggttccgggctcaccgccgggaacggacacgcggacttcaaatacctcagatcggccgttgcatatattgtcaatgactgtgggcacatcatccgggtgcaccacctgccgttttagcagcgtcctggagtaatccctcagttcgttacgtagcacaccctgtcctgtctttggctcatagctgataaatacatcctcgtccatccggtactcaaacatgacggctgaactgacctccatggaaacccggtacatctcctgctcccgctccagctgttcctgaagaatcttgcgctgggtgatatccacagccgtgcgctgtaaaatatcctcaccctggggagttacccccaccaccatgctggtcccctccagccagtggatacttccgtccttccacctgaccctgtattcctggtcctgccggtcaccaatctccctcagtttgcggtacgcctcctgcagaatcaggcggtcctcctccagcacagctcccaggacgccgtcgtgccagtcgtttaaaccctcctccatatccttgtagcccatcagattcaggacggccctgttgatggaaacaagacggtatccgccctctatgtccctgacaaaacggatgatgccgcatggaaccgtatcgtaaatactggtcagcagctgggtctgctccctcaggcgctgggcgtcctcctctgaccgggtcacatccaggtacaggctgttgaccatccagttcccgtctgcgtcctgggctttttttccgctgtcaatgatccatttcaggcttccgtccttacagcgcaccctgtaacgggtggaatatgtaagatttccgtccctgaacgcctcggcacagtcagccagggcgccgggaaggtccggaggatatacgttgcccacagctgtccccccggttacctccatgaattcctccacggtatagccgaacagggctgccgcctccttgctgacaaatgcaaaggagtaggtttcatcgtcattgcttatctttaatccgcccgcaatagaggacatgatgacctccagctggcggttctgctgttttgtctcctcctccagagcatttaaacgctcctggacatactcataggactgcctgccgattttctccggaaagctttccccatccagcatttcctgataaggattggagcagtggatatgggagcatgtaagcccgtcctccgtatcccgaaatacaaaggtcaccctctgatgtactttcaggtacatccgggtgccgggatccgtggctatccacatccttcccataacaacatacacgttttccatgggacagaccacatcgtactcctcatcccatatattacagtcaggtatgctctccctgaatttgcggaagtggtccgcgcaggcctgccggcctgacaaatactcctgctccccagcccccatccaggaaaactgttctgaaaagcaggaggtgattccctctatatcatgctcgcaatagtgcatgtgcataatacggctggccagtttcttcacatcctccagccgctgatgctgccctgtatctgattctgtcttcacgcccataaaacctgctttcctctggattatctgtcgtcaatctgaagcctcagcacatccggacgggaatagtggccgcagacatcaaattccatccggctggcgcttaccctgtccatctccagatccgcatagataacggcttccttatcccacaccggctctgtcacgtagtgcccgtatgggtccacaatgcagctgcctccccggcacaccgtatccggcagcccgtcaatctcatcccggcagcacaggttttcaggatacatgtctcttgtaatatacatgttgcagttgatgaaatagcaccttccctccagagcaatgtgctgtaccgtggactgccattccggattgtcatttgtattaggggaaatatacagggccactcccttttcatacagagccgccctggccaggggcatatagctttcccagcagatcaggcttcccatcaccccccagggcgtatcctcaaccggaaaatatccccggtcggcgtccccccataccacccgctcagcccctgtgggctttaacttcctgtgtacacaaaccaggcttccccggggtgagaaaaacagatttgtattgtaaagcgttcccgtcaccccatcccgttcggaaacaccgatgctgacgtaagcccctgcttcccgcgcagccatgcctattttttctgtctctttcccgggaaccagaatggagttatccagatacagcttccagtcctgccttccctccccgctgcggctgcccacccggaacccgaatgtcatgccgtaagggtagcccggtataaacagttccggaaacaccataagctgggctcccctccgggatgcctcctgaatcaaatccacggccttctgtgtgcaggcatccttgtcaaacatgacaggcgcggcctggatgacagctattttgcatattttctttacatccttcatttggcctctcctttgtgcaaaccagtcttttctcattttaccatgcggttctgatctccacaatggcaggattcatctttcttctgatctttcttataatctttcatgcaaaaaacgcttataggtcaggtcaatcaaaaaagctcccaaaggtgcggtaatcaatatggccagcacagccactgtcagcacgatatctccgcaggccagacccatggccagaggtaccccgcctatggcggcctgtaccgtagcttttggcatataacctatcatgcagaatacccgctccttcatattaagcctggtcccggccaggcagcagaacacgcctgccatcctgaaaaccagcacgccgaatatcagtataaccgcccacacgcctgcgctcaatgcataatggatgtttacagttgcccctaccaggacaaagagcatgatttcggcacagacccacaccttattgaacttaacggaaagacggcgggctgcctcctcccgtttcttctgaagggcgattccgattcccatgactgaaatcagggaggaaaagggcacaatatccgaatatctgtcctctaacgttaccaggataaaagagacacacagcagaatgatgaccttgaccgtatcccgaatatggactctcttaaaatatacggccagcccccagccggccgccagtccgataaaacttccaatcagaatggaaacaggtatcttaacaaagcttatgggtgatacgctcccgccctgggccaggcccgtaaacgccgtgaacatcacaatcacaaacacatcgtccacggatgcccctgccaaaagcagctgcggaatccccttatccgtgccgtacccgtcttcaatcagctttaacatcttgggaactatgacagccggggacaccgctcccaccacagcccccatgatggcggcgtcgagaaccgaaatccccagtagtcggggcgccagaaggaccattcccaatatctcaaagcaggccggaagaaagcacatgagcacggccgggcgccccacctttttaaggtcatttaaatccagggaaagccctgccctcatcaatatgataataagggcaatccgtctcagctctgaagaaatattcaatatagacccatcaatcagattcagggcgtagggacccagaagaaccccggtaaaaatcatccccataaggccgggcaggcgcagcttcctgcacacccaccccagaaacattcccagcatcaacataaaagcaatactaatcagcatatccttttcctccttataaacgcagaaaaagccgatcatttctgcgttaatacataatgcagaagtcatcagctttataagcggttctagtcagactaagggagaacttcattcccggtacttattttataactaaaattacaggatgtcaatgatttcctttttcatttggttttcacttgttttttcatatgatgcaaatatgatgcatctttgatgccattttgatgcctggccattgtaatctggattataagaaaaccccaaacaaaaacaaacgaggtgcaaacaatgaaacggaagaaaacctggctttatgtatgtctgacactgcttatgctggccctgacccctgctgcggtctacggtgaggaaccggacggggatacggcggacaagacccttgccccctatttctttgtacaggacgctgcacaggcggcagaccagttccccctgaaggacacaagtgtgtcctccacaataaacggtgtcattgccgaaacctatgtcacccagacctatgccaacgaagggacaatacccatcaatgccagctacgtgttcccggcatctgccagggttacggtacatggaatgaaaatggaaatcgggaacgaggtaatcacggcaaaaataaaggaaagggaagaggccaaaacagaattcgaggaagctaaaagcgagggaaaaagcgcctctctgctggagcagcagcgtcccaatgtatttaccatgaatgtggccaatgtaatgcccggggatacggtgcgaattgaactgcactacaccgaactgatatcccccagggacggggtttaccagtttgtgttccccaccgtgaccggcccacggtatgccggctctgccccggaaacaggcgggggagatgagtggacggcaagtccttacctggaggaagggaccgccccgcagggtacctatgaaattgccgtcagcctctccgcaggcgtccccatttccagcctgaccagcagttcccataaaatcaaggtggaaaaggaaagcgaatccattgcccatgtaaccctctctgattccggggagtttgcaggggaccgggacttcatcctggattacagacttaccgggcaggagataaactgcggactcatgctgaacaccggggaaaaagaaaatttcttcatgctgatggtacagcccccggagcgtgtcagggcggaagagattccgccccgtgaatacatatttgtgctggatgtgtcaggctccatgttcgggtatccccttgacaccgcaaaggagctcatagggaacctggtgggcaatctcagggattctgaccagtttaacctgatcctgttctcagatacagccgtttccatggcgccaaaatccgtacctgccaccgcagaaaacatccggcaggccattgacctgatagagcgccaggacggaggcggcggcacggagctggccccggcccttgaacaggcagtctcccttccaagggacccgcggatggccagaagcattgtcactatcacagacggctatatgtccgatgaatcgtccatattcagcctcataaacaggaatcttaaaacagcagatttcttctcctttggaatcggcacctccgtcaaccgctatttaatcgacggaatcgcaaaagccggttccggcgaagcctttgttgtaacagaaccgtcacaggcatcagacacagcccgtgatttcagcacctatatccagtcccctgtcatgaccggcataaatgtttcctttgacggttttgatgtttacgatgtagagccggacatccttcccaccctgtttgcccaaagacccattgtcctgtttggaaaatggcggggccagccttccggcaccattcgtataaccggaaaaaccggaaaccaggattatatgcaggaaataccggtaggccgggcagaggccccggcagacaatacggccatcccctatctgtgggccaggacaaaggtggaacgtctgacagattacggcacacgggaggatgtccaggatgcagtcagacaggccatgatcaaaaaaacagtcacacagcttggactggactacagcatgatgacgccctacacgtcatttattgccgtgactgaaacagtccgcagccaggatggttctgccgcggatgtgaaacagccccttccgctgccgcagcacgtatctaattttgccgtgggagccggatataccattggctcagaaccaggaaccctgatactgatgtgtgccgcaggagtcataatggcagcaggctgtatccgccgaagccgggctgacagaaaaaagagaaaaacagaggaggcttaatcaatggacattcccagcgctaaatctttgatccgccggaacatccccttctatctggcaggagccctcctgctgctgggaatgaaatattattacagccgcgggggcccggacagcctctcatggattctggcccccactgcccggtgggtcagcgcccttagcggaattcccttcataaaggtccctcagacaggttatgtcagccactcctgccgcttcatcatagctgcctcctgctccggtctccagttcctgatgatttccatgacagccctggtcttttcctatattcaccggatgagaaccataaagggaaaaataggatggatggccctaagcgccctggcttcctatctgctgaccatctttgtcaacggctttcgtatcctgttctccattttcattcccatatatctgggaatgtcaggcacggcatggacagatgtatccggctctgcatgggcagaaacggccggagcatccggcccagcaccggcccgggcctggagcatatggctcacgccaaaacagcttcataccatcatcggaacggctgtttactttaccgccctgtttgccgtctgccagctgggagaatacgtctcccggaaatgctctgctgctcccggaacatcccaccggggaaacagccgggcccgggccggattttaccccataagggccctgggaagatgggctgcccctgctttctggtatttctccattgttttggggataccatttcttaacagggcatacagaaacagtccccaaaccttcacagactatgccctcctgctgacagccgtctgccttaccgtcataaccttttactgtatctgttccgaacttcacagacgcatcagccggctgacatcaggacgataccgcaaaaatcataaaaatatggaatgacatagttttaaactatatcatttcgtgctaaaatacctccatgcattaaatgcaatggaggtattagtcatgaccctgcagcaactgcgctatattgtaaccatcgtaaactgcggctctatttccgaggcagccaaacatcttttcataacccagcccagtctttccaattcagtaagggagctggaaaaggaaatgggcatatccatcttcaaccgcagctccaaggggattgccctgtcttcccagggaatggagttcctgtcctatgccagacaggtgctggagcaggccgagctgttggaacagcactacacaaacaaaaaaccggtgaagcgtatctgctccatatccacccagcactatgcctttgccgtcaatgcgttcgccaacctggtatcctgccagaacacggacgaatatgaattcaccctgagggagacccgcacctatgagattatcgacgatgtaaagaattacaggagtgagctgggcattctctacatcaatgattttaaccggaaggtgctggaaaagctgttcaaggaaagcggtcttgtattccatccgctgtttaaggccagcccccatgtattcatcagcgtaacccaccccctgtctgccagagacagcgttgccattgaggatttggaggattaccccttcctggcctttgagcagggcgaaaaaaattccttttacttctcagaggaaatcctcagcaccattcccagaaaaaaagtaatctatgtcagcgacagggccaccctgttcaatcttctcattggactaaacggatataccatatgcagcggcattttaaaccgcaacctgaacggcgactccatcatggcagttcccctggaaacagaggaaaacatggtcatcggatggattggggaccccagaatccatctcagcgaatttgccaggaaatatctggaggaattacaccggctgatcagcagtcagtcttaaggcagaacctaccctaagacgccatcagccggaatacggattcgtaaatccggttggcaatataaggattattcatggtatacaggtggatgccgtccacgccgccggctgccaggtccacaatctggtctaccgcgtaggcgattcccgcgtcccgcatggcaatggggttatccccgtaccgctccatcatggagatgaattttttcggcagctttacgccgcacagggataccatgcgctcaatctgctttttgttgaccaccggcatgattccggcctccaccggaacatggattccaaccaaatccatccgttccctgaagcggtaaaaatactcgttgtcaaagaaaagctgggtgataagctggctgacaccggcgtccaccttatcttttaagtgtttcatatcccttaccaggccgccggattcctgatggccttccgggtaacaggcgcctattatattaaaatccccatggttctttataaactccaccaaatccgccgcgtaccggaaatccccagccggctccctgtctgcagtgcggtccccccgcagggccagtatattctctattttctgttccttcagctgttccagaatcagcaggacatcgtcccttgtcaggttcaggcacggaatatgggccacgctctctatgccgtatttatgcttaatagcagacgcaatcttaagcgttgtctgactgttctcgctgccacccgccccatatgtgacgctgatgaaatcaggggtgattcccttaagctcatccagcgtgttatagatcgtgtcaacgggcgctgtccttttgggaggaaaaacctccagggacagtactgttttatggttgaacaatgatgatgttttcatgtatgtttgttcccttccttcaataagtcttggccatgatttccggctgctcatgttttctgattgcagtaatcatagcacaaaacaaaaggaagggataatttgtaaattttatgggcagctatagtttaaaactatatcttacttccggtcataggcctggatgtacacaaaattatcattctttcgttccattctgtattccggatccaatatggcgtcaatgaactccctgcctcctgattccactgccaccaccttcatccccagctcccgctccacatcccggaccgtcagatcatctaaaaatacctgctcacccacccgcagcatattggagggaatctgcagtacttctcccaaatcctcccccgctgcctgccgttcctttaactgtcctatcaggtcctgtcccgttataaggccggataccgtaatggtctccccaaagaaatcattccttatagcgtacacatgaaccgtgagatggggaaacgcatccatcagctttcctgcgaagccgcagatggtgggatacgtcagctttcccgttgcaatggtcagggtccttgaaacggttccggccagctcttcatactcctttttgctgatcacatcctccagggcctcgttaaattcattgatgaacatacgcatcatacccacgccgttctccagctggatatagccgtcgtaacgctcttcctcagggaaatccctgcctgcaataatgtaccactcatcactggcatgaatgaaatgaaggccgtattgctcataaaactcctgctggcggctttccaccatgtcgatgacagcgcctgcctcttccttggtatataactcaatgggaaacaatccctccctgaattttgtaattccggcaggcaccacggaaacgcttctcaggaaaggcaggtattgggataaatcccggatggtcctctctaactctgctccgtcatttacgttcttgcagcagaccacctggccgttcatctccacatggccgtcatagagcatctgcagatacttaagcttatctcccgcaaaacggttgttgagcatcttacagcgcagctgcgggttggtagtctgcaccgatatgttgatgggggccagctgcatacggatgattctctctatgtccctctccttcatattggtcagagtaatgtaatttccctgcaggaaagaaagcctggaatcatcgtccttaaaatacagggtctcccgcattcccggcggcatctggtcaataaagcagaatatgcatttgttgctgcacgaacggtaatcgctcatcaggccgttttcaaactccacacccaggtcatcgtcatactccttgtcgatttccagcagccactcttccccgtccggttttcttatgaccacctcaatgtactcatccttaatcagataccggtagtcaaatacatcctcaatcacttcatgattgattgaaagcagtatatcgcccggttctatttccatctcctgcgcaatagagccgggatatacctcttttatcacatgttcattcttttttgtcttcaatctattttcctcaatattatagttttttccataatccctgtttttatgcttttgcttcccggtaacacgtccacacgcagcctccggtaaacgctgccgcaaacaagaccgcggatgccatggaaggccagctgacactgccgccaaacgaaatttcccgtataagccgggtggtatgggtcagcggcatcatattcaccacccacttaagcgcttccggtatgccgtccagggaaaagaaggttccgcacagaaacgacatgggcgttatgacaatattagtaaaattgttcatgtcgtaatggctctccatcatcatggctgccagaaagccaagggcggaaaagatcagcgaattcaggataaccgcggtcaaaagccacccgtccatggccagcctggctcccgacacgattcccaacagtacgataaacacaccggaatacataccgcggagggctcccgcaaggatatggcccatagccagcagatgcatcctggtgggtgaatacagataacactcaaagctcttttcatgaaggcgcatgacgctgatgcgggtggaaaccgatgtgtagctgttgcgcatggtggtcatggctaagaggcccggtatcaggtagtagagatagggccttccatccatctccatcactcttcccaggcccatcccaaaggtaataaaatacaaaagcggcgataccatctgtgaaaatgtaactctccagaacctccgtttgaggaacagccattcccgccacaaaatcgtggttatttccatcctcccacccccttgctggtgtaatggaaaaatacgtcctccagcgtggaaggaagcacgctgcacagcgcgtcaattccggctgccctggactttgcagcaggcaggtccttaaagaactcagcctttatcctgtccccatcttcgtactccaccttaaattgcccgatttcatcaatcagtccggcgggcgtgtcctccttaaatatcttccctccgtcaatcagcatcacataatcgcacaggtgctgggcctcttcgatataatgtgtggtcagaagtatggttttcccctccttgtgctgtatgtgcaggaaatcccatatatcccggcgggcattggggtcgatgcctaccgttggttcatccagaaatagatattttggattgtgaatcagggactttgcaatcatcagcttgcgcttcattcctcctgacaggttctgggccgccctttttcggacgctgtccagtccgagaaaggccagaaggcggtccgtggacacagcaatatccgcctttcccatccggtaaaggcggcctgcaaactccatattttcttccaccgtcaattccttgtccagattgacatgctggctggttacgccgatggcctgcttgacagccacggcattccggtccatcacctgtccgtcaaaggccacggtgcctgtatccggcgccagaagtccggtcattatccgcatcagcgttgtctttccggccccatttggtcccagcagtcccaaaaacatcccgtcgggaatctccatggagacacccttcaccgcttccacatcaccgaactgtttatgcaggtcattacatagaatcattactgcctcccctgcttcttaatgatgaccgtggaaagatacggtatatcataccgctccagctcctcaaagtcagtcaccagacgctcctcccctgtgcctgtcttggtaatcagcacaaacctgtcctccaaatggttctccttaagagccttcagcagggcctgcgggtcagtggacggtttcatcaggaccacattgtcatgttccctgagcaccctccccaaatcctcactgctgtttttacgcacagggactaccaccaggtcctcattccaggccaccaggggtattttcatggagtcagccacagcgcagaaggaagtgacgccgggcactacctccacctccacgcccgcttcctctatgtagggaagggtatacataaatgtgctgtaaaccgccggatcccccagcgtaataaaggcgccggtacggtccccatttaaatactgcgcgatacaacccgcgttctgcttccacatttcgcgcagctgactgccgtgataatgcatcggataaactaaatttacgatttccgcctttgtgtcctccaaaagtccctgtataatatcaaaggcaaagctgcctgccccgtcctccttttcaggacaaaaaatcacatccgccgcattgagaatgcggtgcgcttttaaagtaagcagttccgggtctcccggtcctacgccgattccatagagttttcccatttttcaatcctctttcttttctcatacctggtgttttgtccgaaacactaaatatggtaccatatatggaggcaaagggcaattaatacctctgtttttcattctagcacaggatactctgccttttcaagatatgcatttgaaagtttcccttcttgtatacaaatacaccagaatcagggtgacgcccaggcacatcagctctgatacagcaggcgcccaccagatgccttctcctccccccacgccaatacagactgccaatgcggccgctatgataaccatacctctgcccaaagagataatcagagactccttcggccgctcaatggctgtaaaataccctgcccctgtaatattaaatcccaccaccagaaacgacaggctgaatatcctgaatacagacgcagagtactgtctgagcccttccagcttttcagagatgaaaatacccaccagccagtcagcacctgccatggaagagataaaggctattcccgccacgcccacggacgctgtcagcgagtacttcaaaagcctgctgcatacatcccgctcctgtctgccgtaatgaaagctgattaaaggctggatgccctgcgcgattcccgccatggacatgaccacgatggtattcacatatgcgatgattgtgtagctcaccactccctgttcaccgatataccgcaaaatggcatggttgaacataaataccgtgaagcctgctgacagctccgtaaaaccggaggacaggccaatcttcaccacccggataaactgtcccaagtcccaaaccggcctggcgaagcgaatggttgcctttggccccaggaaatgtttcagatacaggaataccggaaccatctgggaaagtcccgtggctgccccggctcccccaatgccccagtgaaataccatgacaaacagataatccagcacacagtttaccagggcgcccgaagccacagccgcagccgcaaaccggggaaatccgtctgtctttaccaatgtctcaaatgtatatgatatgatgaaccaccatgtaaagggcagcagggataaaatataatgctttacatactcctgcgtgctctgtgtggctcccagaaagcttacaatagggtccaggcacagccacaccatgagcatgataaacagggataagactcctgtcaccaccatattctgagtgttggcctgattagcctcccgctgcctgccctgccccaggaaaatggccaccacggtggacgtacccacggcaaacaatatggaaacagaaaacaggaagtttacaaagggagaggcaatattcacagccgacaaggccacctcagacacgcccctggccacaaacattccatccaccatggtatataacgcaaagatccactgggccaccacggaaggccatacaaacctccagaactttttcttcagtgacattccctctaaattcatgatacaactcctttatgatgactttgctgctctgcttgcattcccatcataaaccttggtataataccaaggtaaacagtaaatattgccatatttgggagaagattcatgtcaacattctataaaatcggggagattgcctccctttataacataagcacggatatactgcgctactatgaggagctgggcatactggtcccccgccgggcgcctaacggataccgcatttaccgcaccgaggacctgtggtgtctgaatgttatccgcgatttgcgggaactgggattttccatggagcagataaaggcatatattgagaaccgaagcattgattcctccctggaactgttccagaaggagatggatgtgattgaccggcacattgaacggcttaaatccctccgggacaatatcatcacccgcagggaaaccatttcccaggcacggggactccctctcgggaccatcacattaaaagaaatgccgccccgcgcctgccaccggatcatgcagagctacgagacggacgaagaaatggatattctcattaaacagctggtctcctttggaccggacagacagtatatcataggcaacaaccagatgggctcctttatcagcctgtctgatgccatggacggacgatgccagcagtatgacgcggtgttcatccttcaccctgacggcgagcactgcatcggggagggtacctatctgtcggtctgctacagcggcaacttccgccagaccaggacctatgttccccggctcctggactatgccagggaacattccatgaatatccggggacccttgctggagcttttgtggatagacgtccataccacaaaacatgtggaggagcaggtgacggagctacagttaaaggtggattagattataccagcaagtcagccccctgcttatcccttcccagctcagccagtttcctgttcttatcatttaaagtaccaaattccttcagacagcagataacctgaccgcaggacgccaaaacctctgcagcgcggtcatatgtctcttcccgaatcggttcaaaaggcatttccgatatcacctgggaggccagcgccctggcaatggggtaatccacatcattttcgtggagaatgcctgccgcgaatgggattcccatgcgctgcagtctcctgtaaaccggaatcccgcttccgtttccgcctatgacaaatacctgaggcttacccttcaccggttccatctccaggcagccaaattccgcataatagctgcctttggtgattccgtacagcccggtaatataggaggaggtgaaaatctcttccggagttccgcaccgctcaatgtattcaccctttacgcagacaatataatctgataatttctgcgctaaatccaactcatgaagggacatgagcaccgctaccttcttcctgcgtaccaggtcctttaaaatggtcagaagctccagcttatgccggatatccaggaaggaggtgggctcgtccaggacaatgacactggggtcctgacagatggcccgggccagaagaatgcgctgcttctgcccatcgcttatctgcgaaaaatcccgggaagccagatcccatgcatggaccagctccatggcctccctgacctttcctctgtcctctgccgtcagtatgcccatccttccggtatatgggtagcggcctgtgcctaccacatcctcacagttcataagctccgggtgaatccgctctgtcatcagaatggacatcctctttgcaatctccctctcccccatccccttcatgggcatgccatccaggtaaacggtcccttccagcagtcccagctgccgtattacgcttcgcagaatggtggatttaccagccccgtttggcccgatgagcgtcacgatttctcccgccctaacatgaattccgatttgccgtatcagaggcgttttgccgtatccgacggtcatattttctgtccatatgtaatcttctgccatgaaatccgcctctccatttcgcttgcatttctcctgctctttccctgcatctttcctgcatttcacccgcagttctcttgcatcttacctgcatttctcctgcatttcacccgcagttctcctgcatcttacctgcatctttcctgcatctttccttcatttcactgcatacccttgcggttatgcaccatcatgtaaatgaccacaggcgcgccgaatacagctgtcacggagctgatgctcagttccgtgggcgcaaagacggttctggccgccaaatcgcagaacagacaaaacactgcgccgcccaggaagcagcccggaatcatgagtatgggctttgccgtcttaaacaggctcttcaccagatgcggaaccgcaattcccacaaaggatatagggcctgcgaatgcagtcacacaggcagaaagaatactggacagaagaatcagggccaccctgaaccgcagtatgttcacccccatgttctgggcgtacacttcccccatctggtaagctccaatcggctttgccatgagaaaaacaagaatcagcgacaggaaaaccactgccgtcatgacacttacattctcccaggaggtacctgaaaagctgcccatggaccagttgtggagattgacaatgttggcatcttctgcaaatgtcaccacaaaatcagttatggcggaacagatatagctaatcatcaccccgcagataacaagcatggacatcttcttcaccttaccggaaatcatcaggacaaatcccatggaaatcatggagcctgcaaaggcagccagaatcatccccgccgatccgatggagattccccttcccagcaaaactatcatcacaagggaaaccaccagctttgcgccggatgaaatccccagcacaaaagggcctgctatgggatttgcaaaaaacgtctggagcagaaaacccgatacggacagcgccccgcccagtatcacggccgagagaattcgggggaggcgtatgtcccatacaatgcggtatgaagcggcctcccctgtccttctgaacagaatttcacctatttcctccactgacaggtgcacactgccggaattgatgttccagataaataaaaagcacatcatgaccgccagaagggcaaatgaaatactgttttttatataagtatcttttatcattcagactactccttatttaacgcagccggtgcatatacctgaggccttccggctcctcctctgtcagtatacggtggatatccaaaatcatatcccccaggcccatggtctcctgaaacaggcttttctccgtacaccacacatttccctccttcacagccttaaaatcagccaggaggctgcttttctccaaaagctggctcagattgtccagctcaccgtctatggtgctgttatatataatataatccgcatccctggcggcggcataaaagctttccatctgcatattcatggtggacagcgcgttttcattttccgtaagtccctggggcacataggttcctccagccaggtctatcatttcagccacataatcccccgacttcctgacatttacatagccattggaactgatatagaaaaatgatactgtttttccggtactctcctgagccatgacaggttccagctgcttcacctgtccggcaaaacagctgtttgcctgttcctcccggtccagcagcaccccatataatttaagccattccatccttccaagaggatggcgctcgtagctggagcgctccaccagaaccggtatccccagtctctccagctgctcctttacttccggggaatggtaaatcatcgtggattctaccgccaggtcacaggacccggacaaaatccgctcatagtccggcgcgttgtatttgcccgcatagagcatcctgccatcttccatggctgaccttgcctcctctatgtaccagccggaagcatctgtccctgacagtgtaatccggtctgttccatccaggctgcaaaacaggtccatggccgaggtcgccgccagataaatattctccagaggctgctttatgaccgccacgtcacccggaaggccggaaggctgtgattttccttccggcaccaccagataacggccgctgtccttaatcgttatcattgcgtaaccgccatcgtaatagtccactgaaaactggtccgcatagagaagctccatactgccggttctctttatgccgctccagccttccggaaccggggcaggggaggaacccagggactggttattcgcgacagccggatctgccccggtccgccctgccgaggaacagcctgtacacactgctgtcataaggattccggcggcggcaattgccattaatctctttatccgtctcatcattcagcctttttaattgtggttgaatcaaacacaagggtatattccacctcatgaggttcgctcatggcaatggtatccgctatgaccggcatcttccggtcaaatacacggaccggaatctcaaacgaagaattacccccggtacttatcagatccagcttctccccgtcaaccttcatataatcatagttggaactgccccatgtaataaccgcaaatgcattgccgtcctcaaccctaagcgccgccggcgtctccacagacgcccggcctgaaccgccctccagcctgactgccaccgtatacgaaccatcttccagcttaaggctctttgctgtagccgcctcaccgtcggcaaaggcctctgccggaagggagccggaacaaaataccagcacacggtcataccatgtttcctttttcttgctgaaggcactgcagttaatttccttgtccagcgcttccaccggtaccttgaaggtgtgctttccatctgcattctccacaaatggaataaaatccgcctcagaagcctgctccgcctcagccccggttcccatatacagtttcagataaccggtcccgctcatggtcataaccgcgctcatagcgccatcctgcaccgtaagttcacactccgtaatccggaacatgccggagctggagtccaccctgacctcatagaccccatccttcagcgcatccgccgaaaccggctccattccgtctttcaccgcatccccgaggctgcctgactcctggttttggatgttttttgccggggcatcatcatatgccccttcggccagttcctcctgggccagttccgcttcggacagttcccccacagaagattttgcggcggcactggtatcagcaacagccggcgtctttcctccgcagcccgaaaggttccctgcgcacagccctatggcggccaggagggcacagagcttcattttcatgtattttacttccaatattcccacctctaaaagggcgatcagcaaattgccccgaccgcccgtttattcttatgatttattttgtcagactgtcaaccgctgcctgagcatgttctacaaagagctgctggattgcttccagctggccgagtccgttgacaaggcatgtcacttcatagcccgcatcctcaaacgcagtcttccaggaatcttcttcgtctcctgccatgtcattgttggcatggtcgcctgccacgatcatcagcggctccaaaaccaccttcttgtagcttccttcctccaccgctgccaggacatcatccaggcttggcgctgcttcaacggtacccacatagtaattcttataacctgcctctgtaagcatatcctgcatttttgcatatacctggttggactctgcctctgtgccgtgtcccataaaacagatggctgtctcaccgtcatcatactgtgcagttgcctctgtgacagccttcatgactgccctgaaatcatcctctgtggtgagaagcggctttccgattgccactttgtcaaatgcgtcagaatactccgccgcctcattgaccaaatccgtatactcaagtccgttcatcagatgggtgggctgaattacaagattcctgacaccgttcttctccgcgcggtcaagggcctctcctacattgtcaatggcaacattatccctggattttacgtgatcaataataatctggctggtgaatcctctcctgactgcgaaatcaggaaatgccttctcaacagcatcctcaatggctccaatggtcagacgtctgctgtcattgtagctggtgccaaagctgactaccagaagctcattttcaccgattccatcctgatttctggcattatcctttgaagcatctccggtatcgtaattctcctcgccagcctccgctgccgcctctgctgcctctgctgttgtctctggtacttctgtttttgcccctgtggtctgctccgcagttgtcactgcctcagaatctttggcggcatctgccgccgtttccttctgcccgccggagcagccggctgcggtcactgttgtcagggctgctgccgcaaaaaatactgccagttttttcatcttcatcttctctttcctccttgttttatgacaccgtatcggttaaaccaaggtagaggaatatgcagcctgtatctgacaaatcccaaacggcagtccacacgcgcataagcgtattccgcaagcgtcctggggatatacgtttttctgcagatatgtaatacgcagcgtacccgtgccccgagggaatcaccctccgtcaggacacagtttccctgcgtaaaaatccgttaccgtctgagtcagaaatccgcggccgaaacaccgtaaatcggtacaaccaattactcgtgatttggaaaattattcctgtaccaacaactggcaggtttcctgactcgtatatcaacacccatggctgccttcccaattctaactgaatcagtgactgtccttgacataaaccatgggctccttacttacagtgacgagatcgtacaggatttccacctgtttccctattacccgctgtctgacaaagacagacagcggcaccagctgttcttaactcgatatgctttatcctaccacttaatgtaaaaaaaagcaataaaatcaatcattatccggaagcagctttactgtcaccatgatgtgtttcaggaactccccttcctccagcctgatatcctccatatgggtctggggaggaaactcaaaggttttctcctcaatctccagatagagccagttgtaggctgcttccctggcatgctccacagcatcctccaggtccggtccgtctgcctcgcagcactgcagatccggaaatgttacatgatagcctttatcgtttttatgaggcgtaaataccgccgggtacgtaaatgtcattttcttcttcctccagtattcataataaagcatacttattatatactgaattttgattctgtacaatctcagactggttttggacagctgtaattttttggagtggttttggggaatggttttcacactttatatgtctcgatccttcgatataaagctatcccgggcacttcccataccttctatgatatcgtgaacagatacacccggattccggtagcggaccctcttctgtgttgcatgtttccactggatggcctgttgtgggcagcagttgatgcacgctacacagtgttcgcagcggtgctgaaattccggtttttcatttttcagtacaatattccggctggggcagatcctctggcaaataccgcagcggatacaagtatcatccacatgaaatcctgtgtctctgttcagtttataatccgtataaagcttataaaacattctgtcccagacatggaacccaaatggtccgttgcgcctggctgcaatcacttctgccgaagccctttcagccatctcatcagcttccctgagttttctgtccgccgaacgtgtcttgggattatactcctctataaaattcgctacagacggaatcgttattccataatccagatgaagcccctttttcttaagaagagcgtccaaatgccccaatacacctccggcaagccctccgcaggttgcggctgcaaacacatatgggttatctgcctcaactttcatttcatccacaaactctgccacggttctgggaacgccccagaaatatgtaggaaaaaccaggccgatttgccggctgctgcattttgtccccttatatcttgacatgggatgcagcagcccatccatcctttccgccatgatgttcgcaatacgcagactattgccggttgctgaaaaataatatatcacggattccatatctttttcccctcctgtttgttatacgctgattatagacatgatgcatcaaaaagaaaagtacccaaaatttttgtggtacattgtttaacaatactgttggtgttataatcactctgcatactcaacaatattcctgatacagcagccggaatattgataaaagccaatactataagcacgcagcagggggagtcaccgtgaaaacagaaaaatcagttccggaacgatgtgaaatcatacagaaggttcagagagtccttggggggaagtggaaaattgaaatcctgtactatattggtttccaggatatacacagatttggagcgctgcgccgccatatcggcggcatatcagaatcatccctgattaatcagctccgttcccttaaagaggatggctttatcagccgtcatgactataaagagctacctcccagggtagaatattccctgacagacctgggacagagcttcatgcccataatggaacacataaaggattggggggagactcaccttttccccttatcctcatccagatagtctctttatctgcattttgaacagatgcagtccctacgctctcttcctgctggtcatggtccggtcagaaaagtacaggtaaaatagttggtaaaatacagaataaaagtcattcctgttcatatcttattcataccttgatgatatatttgatttataaagcgtaatgcttttcatacaacttttctcatacaaaatgagccggcaggaagctgccggcccatttgtattaccaaacctgctttctcacccgccaccaccccgtcatcgtccccagccaaatcccataacagggcttttcagcaacatttctttaccttcaaagcgccgtccccttctcaggtataaacaggccttccatgtccaccccttcatgcttcagcagccatatctttttatcaatgcccccggcatatccggtcagactgccggccgcgcccaccaccctgtggcacggtatgatgatggaaataggattgtggcccactgctccgcccactgcctgggctgacatggtttcccggttcatcttctccgctattttctttgcaatatcgccatacgtagtgagctgtccataggggatctgacagaggatttcccatacaccctgccggaattctcctcccaggggagccagcaaaagctctgaggactcaggcctctttcccgcaaaatagcggtccagccagtcctttgtatctttaaaaatcccaagttccggggcctccgtcatctcttctttaacagtaccggcaaaatatttctgtccttccagccacagcccaaccagtctttcgccgtcggcagccagcttaatcctgcccaccggcgatatataatctgttgcataatacatactatttccctccccaatcttttgattgcacagcgaatctggatacgctcctccctgttctgctctgtgcaggaacacgcctttaccccagcagctccctcaccatatccccgtcaaacaccaccgcagccacattgtccacttctatctggtaaagggcattggcggccatatgctccgcggcctgttccagatcccggatgcctgtggtgtccgcgtatttttcaatgaccgcgtcaagcgcatcctctgtcaccacacactcattttcatgcagccccatgcgctttaaaacctttggcatggcgtactttgaaaatataattttcttctcctccggcgtataatccggaatatcaatcaccgcaaaacgcgacatgagaggcgcgctgatttggctcttatcgttggcagtggcaatgggatacacgccgccggtgggtatcatacactctatgtaattgtccgtaaatcccagattgtccaggagggtcagcagcacatcggcgggattgccgtttccttttcctgaagacgccttgtccagttcgttgatgataaagacaagattggattctcctgccatagagaacgcttccatgataattccgggtttggcattggaataaatgcgggaactgccggtgagctgttccgaatcattgatggagctcatatccagggttgtccacggaagctttaatatcctggctaccgcataggcaatctgtgactttcctgtacctgccgggccaaccagcagcatgccgtatgcaggaagcgtatgggtgcggttaatctgtatgatggtctctatgattctctgtttgacccgttccatgccgtacagttcctcatccagaatcctgcgggcctccacaggatcaatggattcaaaatagtgattcttccactgaatgttcatcatgatggaaagggcgcgctgggcatggcgcctctcctccggagtcacttcatgggagcgggccaccgccaggttcctgcgggcccaaatccgtatattgtccggcagcgtcctgccggcgcagttcatgaaatcagtaaggctctgaatactggtcagcttcatgtcgtcaccgttttcctcctggtcctcctctgccagttctggctccggcgcgctgcctgccagcagccgttcaatcataaactgtagaaaaccgtcctcggcagacagcttggtccctcctccaaaggccacctcccgaatcttatagaccgcgtatccgtctccgcggttctgaccggacaatcggacgctgatatggttttcccccagccagcgcagcaggctggtgaagcgggcgtcaacctgcaggatatccgcgctgacagtcccgtcctcctccttgaactcgaaagcggtccgcttggcctggttggtgaaaacgccgcaggaatggtgtctccaggcccggctgctgttatccagaacaagcatgggcttctccggagaagccgccggctcattggagtaatataccgtgtaagtgcactgtggctcttcttccttttttggtgtgtcgctgaaatcaaatactggcataaaaatcctccctgatattgaaagagagagtcataacacctctgtgccatatactctctctttgtggctgaattcgtgtatgtccactggaaaagcacgttttttctagccttattatatgtaaatccgttttttatgtcaatagatgattgcggcgttttcccagagattttctccgcgaagctttttcggatgtgtctccaccgctgtccggcatttcctcctgtacggcaaccctgcaagccagacgctgcgccatggcaacggatgtcagcgtcacataaatctccaatgcgctgctgatgattccggccaccgccaaaaggattacggacacccccacaatggctccccatccatacagaaaaggcctgtatgctcctggctctgtctgatacctggtccggattatccaaaacaggtacaaaagcaccagcactgcggataaaaatgcaaatacgatatgcagtacagatttgaggggcaattcctccggaaggtagggcgtcgtaatggcgcagaacaacagtaccagtgcagccggtatcaatctggcgcagattgggtgcagcgctgcacgggattttatatttcggtgtatcatataaaaataacttcccaccagaactccccacaggaaaaacgactttttcctgtcaaaaaaattgccgataacagaaaaattggtggtaaaccaattatatcctcttgtaaataaaaccgtgtatacgggaattaaaaagtaagcccagaatttcattctttatccagtccgtttcttttgttttctacaagtatagcagactgggcaacatttatatttaaaaaactctgacttctttctaaacaaatgataaatattttacggccaccctggaaataacgtaaacagaattactgccactgctgtacagatagccggcgtcaccaccgaaaggcagaaaatcggaatgtaagcactcttatgggattcaccacacaacccgatggatgtattaaccgaaccgctgtggggaagcgaatccagggaggaggatgctatggccatgactcttgcaatggcggcataggataccccctgcatggccccgaatatatcatagaatataggtgtgatgatcccaagtccgcctgacgcggaaccgcagaatcctgcaagcagcgctgtcccgacagaaacgcctaccaggtaattgccagggatatgtatgactgcatctacaagcaattcaaaggccggggtggacttaatgactgttccgaatccgacaatggtacatatattgaatatcgccaccgctgccttgggtacactctggaatacagcctctgttagttctgccctgtcaaacctccggtacatcagtatgatggttgtggctatacccatgagcaaggcatattcaatggggattatattttcccccgccttatttttcaggtttattgctattacagtcaccagcataggtataaaggatataagaggactgggaaggctcccgctcttctcatctttgtcatcatccctggacgtgaatacctccccggccttttttgcattttttatcatcattgaaagccagaagcttcctatcagcagcattaaaatacttgaaataaagccaacaactgtcccggccatcaaatccaccccaaaaccctgggttggaataatgttctgcacctgcggcgcccctggcgcaatcatggcaaatgtacaggagccaaaatataatgctgcgggcattaaccggcgcggtatgttattttccctgaaaattgccagcgcaatgggaaacgtggcaaaaatcgaaataatggccgtgacgcctccgtagcagataatacctgtggctaagggtatggccagatatgccatgctcttaaattttccagttacccatttggcaatggaagtggctgctccggacaattccattgttgttcccaataaggttccgcagaaaaacaccaggtaataggaacggtaataatcggcaaagccagtcatataattttcagtgagcgtcttatatatgttcatattaccggacacaatcgctatcagggatgcaatcattactgttatgaacaggttgactccccgcatcatcaagaatattagtgtacaaaatgctattactatccccacaagacttatatatgtttccattttcccctccgccattaattcatattaaaaaatacctttacttcgtccggacttgcaatctccctgtcaacttcgcgggccatatcagccgcacgcttaattaattctgcgtttttcggagcgcccagttccttatagtgataatccccaataccaattgccaggcccccgccatttttcagtacatgcggagccacattcagaagattccctcccagacagtttgcactccagtaacatggttcatcaggaagcacgcttcgcatagcatccacgccgctgaccgtacagggatgtcctgttatgtacttgccctctgtcagatgaaacaggaaatatcccggctttgtgataaggcccatatcaatcagctttcttcctcttctcacaaatcccacatcccagcaggtcatttttacctttattttataattaagcatctccctggcgcaaaactccagcgtactggttgaattcgtatagatggaatcagactccgtgaagcagcccttttcttcgtcatattggtccaggttcacgcttcctgtatccagaggaatgatatccggcttcgtggattccttctttgccagttcggatatgattttgatacgcgagctgtccttatcattgctgttaaagccaagtgttggcaatagtaaaatgtctgtcttctcccgcaccttttctatgatttcagcatacacttccgcgtgattattaggctccccggcagctgtccttgcgtgaaaatgcatgatggatgcaccagcctcccttacacgctgcgcttcgtccacaagttcctgtaccgtccacggcacgttaggattcatgtccctcattgcatattcgtttacacgggcttctataataacctttttcatatggattttaccttcacctttcttttttatcgaacctgaaaccggatgccctatactctcccgtttccttcccgacatccggccgactcagacaataaccgactcacaacagccattcctatctccctgccgccgcagaatccacctttcaccacaaccggcaatccggtatagtttcccacgatacggcccacatcaacctggggaactatatgatcaatggcttctatgtaggaaacatgaagcctgcggcacacgctctccatggtatcccctccggtcagcagaagtcctgacacctgctcccggcccgccagctccatcactctccccgtaatctctgcaagtccttcattaatgagtcttgaacaggtaccggaatcatatccgcgcctaaggtcctcatcattcagatccaccacgcagtcctgcagggctgtccctatgataatggactgaggccttggtttctgccggaacagatttactgcaattccaacagcccggttcacttcttcctcgaattgtacctgtccgcttatcagcatgtacgcagatacgtggacaggtacattggcctcgctgctgcacaaatacttcatctgtgctttagtcagcggatttgcgctgcccaccacaaataatgccaccttttcctccggccccgtactgccctctgcccccgttgaaacctcctcctttatcatccccctgcggtaattcagtttcatggtaaacgcacccgggtccacagccagtacattccaccccaattccacacaggtctgcgcaatcaggtctatatgctccaaagtgacggcatccattaccagtatctgccctcctcgctcccgggcatctatcatggcacatttaagagttcccttacctctgtccacattttctatggaaatcaactcgacttttcgtctgctctgtccctgaatcagtcttggaacaaatgcatcctttaccggggtttttacatcctgggcaatgggagtttccgtcagcacggtcccgtcaatgattgatataccgtttaagcagattctcctggattgcggcattgcaggtaccatcaccgcaaccatatctccgccaagagtatccagcatggcgtctatttcatttccaattctgccgcgcagcgttgtatctatttttttagagaaacaggtaacacctgtggactttagagccttcgttgccttgcacacctctctgtatgcatcctcaggcttcaaatgcctgctgttgctgcttacaaaaaccgcatccagacatcttgcctcctcagaatcctccagagcctcagcgtctaaaaacaaaccggtccttgcctgtgaccttgcaatcagcgcgcctgcacttgctgcgcccgtaaagtcgtcggtaacagctcctatcatcatatattccccctgcttccgctattttgcatcatgattttccatgttttcatcctgctttgcatcatgaagggcttttgcatatttgacagtggagtcgatggctgccgtcatgctgacattggtggcaatccccttccctgcaatatcaaatgcagttccatggtccacggagcagcgtaaaaacggaagtcccagtgtaactgaaactgtcctctccaaatccagcgtcttacatggcatatggccctggtcatgatacattgccagtatagcatcaaattccccattttttcccctggaaaataatgtatccggcggaaccggtccgattgcattgattccccgttttctggcttcctcaatggcaggaatgatttccttcatctcttcatcaccgaacagcccgccttccccgctgtggggattaatgcccgccaccgcaatgtacggggtttccatcccaagccgctttaactctttatcaatgcggcatatatcgttcagcacatgttccttcgtggcataccggatggcattcatcagtgatatatgtctgctgagatggaataccctcatcttaaagcagtcaaacatggtcagaacatacggagcttttgtgccgtccatataaatctcggtatgaccagcctgttttacccccaccatcttaatagccaccttgttaatgggagccgtggtcaccgcatcaatctctccctccaaccctaattcaatagatgtgcgaatggaatccattgctatctgtccggcggccgcctgctccttcccccacaccagcttcgagatatcatagtgtcctgtttcaaggacatctatggagccaaaccggaagcaggcgtcagacacggattcaatcctgttaaattccagactgcattggggaaggactgcctttgctctttcgagtacattcacgcagccaatgacaaggggcctgcattcatcataaatatgtttctctcccaaagccttcaggataatctctggcccaattcccgccgggtctccgattgtaattcctacaatcggtttgtatttctctttcatgagtctctccttttgattgatattttttatttctatattctttcgatatttacatatataattatcaattgaaaataataaaatgtcaattgttatttttataagaatatgtacacaattctttgtgcatttcttatagtccgtatttatgccggataataaaaaagccaaataaaagagccttcatgcacaaagcacaaaagctcccacttaaaaaattttatattttcacaaacctctgattttaacaccccatcagataagatccagctcaatgccgagattcctggcagtctgaacatattctttttttatttctgtatcagtaatcaccctgtccacctcagacataggacacaccgtaaagagatttctgctgccaaactttgaactgtcggcaataacataaacctcgtccgccacccgtatcatttcacgcttcacatccatctgaggggttcccatggaggtcagacccgttttgagattgattccattgacccccacaaaggccttgtcaacatgaaactgccccatggctcctactgttatgttatccagagcagccggaggattgccaatgacatggcctcccacaataaaaaggtccacatgcctggctgaagtcagctcagctccggacagaacagaattcgtcaccactgccagatgtttctctgcatgttcctttatatatttggccagataatatcccgtagtggaatcgtcaatgatgattgagtccccgccttcaatatactcgtaggctcttttggcaattctgtattttttgtcactgtttaggaaatattctccgggaatgaattccaccgagagtccgttttccttgcggaccgctcccccgtatgttttcttaagaaccccctgctggtccagctttcttatgtcattccttatggtcacctcggaacaccccagacgcccgcttatttccgcaaccttgacaattccgttggtctgcacttcatctatgataatctctaaacgttcgcttgctttcatatgcaatatcctctttctatcgtttaaatatatctactgatttattatattacatacaaaataagattacaattgaaagaactgaattaacgaaattccatcatggacgattccgccccggcaaaaaacagaagccgaaaatcaaagggtcaaagggtggtttccctccacttgactatattcttaaacaccacttccccgtctgttttcttgccgtccaggatgtcggccagctcttccatggccctgaccccttcctgataagcgggcgtgatgatggcggaaatggttggggtcgtcattctggtccatccctccgtgtcaaagccgataaggcccagtgtgtcaggaaacagcctcatataatccgggtatctgcggatcgcctggtacaccacctgcaaaagtcccggactggcaacataaatcagcgtcttttttttcaggtcaatctggtccttcagcatttcatacacctgatcggacttcacgccctcctggagatactgggtggcgccctccttccaggcgtcctgaatggcgtccttatatccctgggtattctcaaaacccgcgctgatattggagtcgccgtcggaaatcatgagaaagttctcatatcctttcttgatgcattccgaaatcacctgatacacgcagtcataattgttgctttttacataccgccccttgaaatcatagggcttggcatccaggtatacgacgggctttttctttttttccaggtctgaggccagcatgccgaagcggtaggtggactggactataaaaccgtcaacccccagccggagcatgcgttccacataatccttctcgtgctggaaagcgagaccgctgtttccgaccacaatctggtactccagggcactggccgcctcctcaattcctttgagagccctggcgcagtatccctccgacgtgtccgccagaatgacccccgccacgccgctgctcttggccttcatggccctggctgcagcacttggctcatatccggtctcatcaatgatatgctgtattctctgtttggtctcctcagacatcttattaatcttgccgttgagatagaaggacaccgttgtctttgaaacacccgcccgttcagcaatctcattaattgtcaacttcttcattctgacctccacccgcctcatcctgcatcgctcttataaatataccattaaatccttaatcggtaaagtgtcgtgttcccatttatggtgtgaatggctgctgcctttgcataaaccggcacccctttgcaatagtggattttaccgccctgccatgtctcctgattccagaccaggaaatcccaggattcatccggcgagatgcaaaagctcatggccgtcacctgttcctccggctcaggccggctgcttccatactggaaaacaggggttttcttagcctctgttccctcacccaacagacaggtccagtctgtgatacggtctgtaaagccggttttcctgaccagacaggtgcttttttctttctggttatattgtttggatataatgcagggctctgactcaaaggggcgtgatcccagcaccgtcattgacacatccccgccgcagcacagtctccagtattccccggtcccgtccttgcccggtcctgttcgggcagcctgcacggcactgtccagatgataatactcctttacctcatggctgccgtcgcagcgtatatcattgacaatcatccagattccctggtccaccgccatcaccttgcggatgaccagataatgttcgccggacataagacatccgtgataagccatttccccgtaatggacaggcccctgttcccggaagtaatttttaaagctcagtccaaagctgtcatacccccatgaacccctgggccttccatgggattctccgtctataacgcatacattgtgggcctgggcgctctttagaaacgggcgcagcggttcctcctccacataggagtacctgccgctgtccgccagtacggaacggcctctgtaatagagcgatatatgggtcaaatccgcatgtccgtgaccgcttccaaggggaccgcatttcaggtaggtaaaatggctgtcctcctcccagctgcttctgaaaaaaatatgcccggcatccactgcttccagggaccggctctccggctttctgccttccatggcgcggtatccggcgattccggcactgcctagcagccaggcgctgtccaggtccgcggtatcatatcctgcatacttatacctgccatcaccggttagaacagcagccttcaccatcacatccctcacatcggtaacatcgctgtcacattgggctatctgaacatgatccggtcccgtggcaaaaagcacgtaacggctcatcctgtcaactgccttctccagccagtctgtactgcgccaaaattctttccggctatctccatccccgccaggttcaccccagccatatcccgcgccggccttatcagtcctgcttccaatccggccgatggcccggcaggaggccagcagcttcatacaggccagaagcacctctacatgatacatcatggactgctcccagtgggctccgtcatccagcacctgaagcccaatctgacgttccagttccttccaggcccagtcctctgttccgtctgaaggtaaatattcgcgaaaccacaggtacccgctgcatatggatgccgtctgaaggacgccccagttgctgagcgtatattttccaatgtacctcttcctcaaactggcaaactggtctttcatgctctccaggatttcccctgcttccctttcctctataagtccctctcccagaagatgaagcagcagatactgccagctcatacaccggattcccgtgtcaatggtcctggtggtcacggttccctctggcagtatggggtttgcctgtatccaatgaagcaggaaccatttcagcttttcagcatatgacgtatcgccggtaagccagccggcaataagcagtttgttcatgtattcgtgacggttcagcatgaaaatccattccggatccccgttggggcttctgtcccatatcatttccttaagggtaaacggttcacggcagggttccatatcccatctgtcctcaaacgaaaatgtatgcgccatgagcctgtctgcctgcgccagaatttgttttgcctcctcccggcagttttcagttatatgggcggtcacccgttccttctcataccaggctgcgtaggcctctgctctttctcttacttgtacataccgttcatcacccatagataactcctttttattccatttggtctttctctcattcaggcgggctgctgcgccccctgtgatcttccatatttataaaccagagagggaggcacccctgctgtatgcttcaggcatacatgccaaagggtacctccccgcttttttctaggcaatcagatgcaggacagaaagcaccacacccaggataatggtaaggatgaccagcttataggtggtccactttttcacttttatcaggtagaaaataagtcctgtgaacaatacaggaaggagcttgggggcgatggcgtctatcatctcctggatggccaccaccttctgctggtctcccggcatattggcaacgtattgaatcggtgtggaaatcttcacaaaatttaccgcaagtcctgagataacagtcacacctatcatgctggcgatgttggaaatctgttccatcttcgtgctgagggtggcaatgatgttggtgcccagtttgtatccccacatgccggtgagaagcttcatggccagaagaatcacgttcatggccacaaagaacaggatgggccccataatcaggccgtcctgggccagggacgcaccaatggtggcgaacagcggcgccagacagaactgggcgagagaatcaccgatacctgccaacggtcccatgagagccattttgatgtttcggatttcattggaaggagtcttattctccagcatgaccagatgaaggctggtgataaacgggagaaaatgaatattggtgttaaaaaactctatgttctccttcaatgcttcctggagtttgtcatcgtcgtccttgtacatcttgcgaagggcgggataaagtacatttgcatagccaaggccctggtaattgccatagttaaatccattctgcaggaaataggcccgcagggatgttttcatataatcttttttctccagctgattaaatgccatcttcaaattcaacctccacttcttctacagattcgccgtttcctttgccggcatggaaaaatacaagcagcgcaatggccgtaccgataacagccactcccataacaggaaggttcaggtaggcaatggcgatatagccaaacagtacaaatggaatcagttccttcttcgccattacattgagaatcatggcaaagccaatggcgggaagcatcttgcctgccacgcccagacccgcgctgagccatgcgggaatcagtgaaatcaccttctggagtccctcggagctgaaggcgccgccgaatccgataataaagccgaccaccgcaaatacgcagaccgtcgcattggcagctatcctgaagccgcggaaattcttcttatccagggccttataagcatagcttgtaagggttgtggcaaaggtataggtggctgtaatcacaaactggaaagccactgcaaaggggaatgaaagagccagggcagagcccacatcaataccagaatccttcatggtaatggctatgatggttcccacaattcccgggcccatggggtttggcggtacggaaccgccctgggatacgccaaatcccataaatgccagctcgcctacagctcccatggccaggccggtgggaaggtcccctaaaataagtcccacgccggctgccatgaccaggcaccggttggtgtaaattccgaacagcatgcctgccagacagaaggctgtccacagaccgattaacaaacattgaaacatactgattgtcacgataattccctcctcttaaacgtgtattttacaattaaagatacttatttaaatccaccctggctgccccgtcgtcgccggaagcagttgtcctggtattaaagacaactccatacgtgtcacgcagctgccttaaggctgccttatcctcgccgcccagtgcaatatacttgctcacttcctcctttcccggagcgtgatggatattgcccacattgatttccttcacaggtactccgcccgccaccagcttaagcgcatcctccggcgtcttgcagacaataaagatggtctgcttcggagatgccttcatgattacgtcacaggtgtgctggatagagaaaaagcgcatggcgatggtctttggaaccactgccttcatcaacgtctgctgcatggaatcctcactggccgaatcatttgcaacgataaccgtattcacgccgagagctttaatccagagctgtccctgtccgtgaatcagcctctcgtcaatcctgaatgctactatattaggtactgccatttcatatcctccttgttataagcccattttgtttattctccatgggttttcatgttttcttaccaatataaattccagtctttatagaaccgcataagggcttccatataataatagtctccccagatattcccctcatccacacccttgcctgaatgccatgaatacactccatggagcagcaccggatttccgggttttatctccggcgccgtatagcgttccatcagggagcgcaggatacagtgcatggcatggcggtaggtattcttatcggattctacctccggcagatacttaagcatctcatgaataccgcacaccccaatggctgccgccgatgaatccctggactgatttgaaccgtctgtgaatatcagatcccagtaacatacctcatcctccggaagccggttcagaaaataattggtcattcccttaaacagattgaaggcgctgtcatccttgacgtatctgtaattcagcggtataccgtagattccccatgcctggcccctggcccaggccgagtcatcgctgtatccctgtctggtaacgcccttaagaggttcccctgtcccagggtcaaaataaaaggtgtggtacgctgaggcgtcatcccttatcacattgttgcaggccgcctcataatgccgcaccgctgcgttccggtatacagggtttccggtttccagaaaagcccagtgcagcagcggaatattcagcaggcagtcaatgatcaggcggtagttgtccctggctccaagctctccccaggcctggatgaaaccgcccttttcctgaaaccgctccatcagcttatcggctgccagaagccctgccttccggccctctgcagaaccagtcagcttatatccggccacgcatgacaggctgtagagaaagcccagatcatggtggtccagctcaatgcgcttctctacccggttcaggaaggaatccacatttttaagagccagatttttaaatgcatcgtctcctgtgtactcgtagcacagccacagaagtcctgtccagaatccgtccgtccattcgatgttgtctatgactccgtatgtctggttcctggtggctgaagaagggaatctggtgccaaagtactccatattgcatcttacctggtccgccacccggtccatggctgccgtaacctcttccctggtcagaaaccccgctgcctcgtattcagccttcctgttgattggttccacatgaatcttcttaatcacgttctcaatccccatcctttccttacatcgagccggattggaatgttaaccaatcctgcaatccgttcttataatcagttcttacagtccgtcctcaaattccggtgcttcctcttcgctgtccagggcatccaaatcccgcaggccttccctgcctgctgccagcagcgccaccgccagttcgtccagcccatacataggtctggagaacacggcttccaccagggctgccatgttcacaccggcaattaccttgattcgcttgtctgtccgcgcttttctcagggctgctgccgtgttaaacggggtgcctcccaccaaatcagccagaatcagtacctcatccccttccagtgattccatggcctttgccatggagtccttcaaatcctctgaactttgtcccatctcaaagttaaccgcttccgtgttgtccggtttcccggccaccagggagacggcgctcagaataccctccggaaacgttccgtgtcctgttacaatgattcctgtcatgctttttccttcctcctgttttgttttctcctgtttgttttctcctgtcagttttcctccaggtttacttcctattagtttactacatcttcaagcaatcttttccgtcccctgtaaatgtcacgttttagtaaattggtttaccgatatttggagtatagtactattcacaatgattgtcaatatcttcttttgttttaaatatttttcttgcatattgcatagtattttttcctatattttatgcatttatcacatatatcatcaccataaactggtaatttctttatttcccctcttatttcccgctgtttcgttttctcagtaaacctttcaaagtttacctttcatttttatagtaaactttccgtcatttctaacctttagtctttttttactcaaccgccactttcttatgaaaggcggcgctcagatagcatgacagtcttggaggacgcgcaaaaatacaattggcgaggcaatttaatcatcgcctcgccaataccacatccaactatcatattttattccatcacagtatatcccattctgtcatccgctgtcacaaattaagattccatctgacagccgccggataaaatggagcaattatattccatcttcctcacagtcctgatgtaaaggatagccaccagtcctgtagagagtatatccgccacaggctgggcccaggcaagaccgtccagtccaatggccattttcaataggaacagtgaaggaatatagataatcccctggcggctcagattgataataagggcttctgttgcagcccccatggcctgcagtgcgttggaaagaacgtaaaacataccgaaaaggaagctggtacacagcaggattcgggcaaaccgggccgcatagttaaaagcagacgcttctgtcaggaatacgctgacaatctgattgacaaaaaaatagcagattatagtcatcaccgcgctaagcccaaaggaacaaaggatggaacatttcatcacctgcttaaaccgccgccacattcccgcgcccacgcagtagcccaaaagaggctgaatcccctggccaaaaccaatgcatatcataccggtaatcatggttatcttcatggccactcccattccagcaagtgccatatccccaaattccgcaatcaggctgttgacaataatttgcgaaacactcataagcagggagcccagagacgcaggaataccgatagccagaacactgctgcacacccgattcctggttgtaaaatctttcacttgaatgcttaaggaggattttcctcccttaaaataaaggatgtagtatcctgcaccaacaatattgccaatcactgtggcaattgccgctcctgcgatattccagccaaaaccaagaatcagaattgggtccagtattacgttcagaagatttcccaagagctgtcccatcatggccttccccgactgtccctcagcgcggattatattggaatagcagttggaaataaggacaaatggaccgctcaggcttacaatagtcaggtaaatctcagcaagctcccaggtatccgcgctggcgcccatccatcccagtatctgattcataaatataagaaacagggctgccataacaatgcctacggcaacacagctccacatacagaacgcgcacacgcttctggcatactcatgcctgccttcccctatagcgcgggatataactgacgtaccgccaataccaaagatcgttcctgccgccataaatataagaaataccggtgtcgccagagatacggcagccacctgcagggcatcatgtgtctggcctataaaaaaagtatctgccagattatatatcaataccataagcatagccgccatagcagggagagcatttttaaaaaccgcctgaaacacaggcgctttgccaaatatgtctgctgcattgctttttttcatttagttttcctcctatcctggaaaatggcgcactccgccgcaagttaataattgaatagctgcgccagataaattccatcatatcaatatcatgctattatttttgccgcaaaatacccgctgtgcgcagctggtatctatatcaaactgtcccgaaccttgcgaaggaggctgcccagaatcccctgttctgtctctgtcagaccggacagaagcatcctctccgcccttttcatgttatcttccgcttcgcagcagcattctatccctgccggagtaagcctcaccatcttaacgcgccggtcagacgggtccccgaagccctctaaaaagcccttttgttccaaacgcgccacaatacctgctgccgtagactgggccacatgaagtgcatgctccagctcctttagtgtcagctgataatccggcgcaccgctcagagcaagcaaaactcctacctgggccatggtcaaatcctgatggcgcagcgcattatttgcatttttttccagcgcatcatgtatctgtttaatacaggcgccgcatgaattctgagcaatcatctcttcacctccttattactgcaaaaaatcatagcacaatcacttgtatttttcaatagcttactattgttttaaagaaaaatttttggagaaccttccccatgccccaaatagataatatatatccattatccattccattttttcctatatctgcccctgcctctccctcaaacaaataccatgttttgacttcagggccgcaggctgctatcacaatctggccgtattctgtatcatataaaagggctgataacggcctcctctgccccagcctgcctgaaagcattcccttgaagcaccaaaagggacctatgcgctttcccaccatataggttttggacagacagcggcacaattcgctcttttccttcagagagggacttggctctattcctccctttacacagtcctgtggggcatcacctgttcttcttttcagcaatccgtacagggcagcatcacacagggcagattcttccttcctgtatctcactgtctttctttccatatatctgccctggttgcaatagatgtccagcctgacattttctcctttttcggtaacacagattcccaccatatggttaatatactccatactcctccttggttacactcgatattgcggtctttgttttcttatttatttcaaacgtattaacagagtggaatacacccggcttttcttcccaacctgccaaaacctctatggtgtcttttgtctcgtactgcaccctgtattccatctctttttcttcatcctggtaaagccctgcctctgccatcatattttccatgagatacggggcgtttgcccggttgatggcaggctctttttgccacacgccggtttccgtgtccatataataccaaatgccgttaatctggttccagcctcgtaccgtctccccgtcatccttctcatagaaccagcccatgggttcctcaatccagcttccggcccaggctgtttgggcggacagcgcaagtaccgctgccgctgcccccatacctgtcatccatcctgccactctgatttttttcatccatatccatcctttcgcctgacccttattctatatcagctatgcccagcaccgcccaatcgtatgtgtccatggcctgctgcaacgccaaatccgctgctttataatctgcttccttctgcacgtaatccagttcttccatcaaatactcgtccttgctcagcataccaattgcatatttggtatctgcctgctgcttatttatccgggccttctcatatcctgtcctggcctgctccagggcatcccgctttatggctgcatcttcgtacagacgtttcattttcgatgtcaacttctgttccccgtcttccatggtcctaagcttataattggagctggatgtggaatccaccttcagtgaatgacggtcgctgatcagcgtataattgttccctattgcctttgcggtatcttcctccaggttcatggttcctatcctggaggggtccgcggccggaatggacgcaacctgaaggcttccgtccgcctcacgtccaaccatcagacacagactgttatatatactttccatattggcttccacctcagccagagatgcctgagctgccagcacctgattcttaaatgagagcacctccgccgcggcagcagtccccgcctgctcctttacggttccaagctcgtactgtgtcttatacagttcctccatcttctcaagggtatatttttgctgcctcagcgtctcatagctcaccatcagagactgggctgccacggtcatctgccgttccgtctgtctctgggtactggtggaggatgcagtttttttcatattgtccagcatcttataataggaactggctgccgccttgtaggtttgttcctgtgcagtataataagtatactgttccgcattgcctgcatccttagcgtcatccttgtcagaatcagcccttccctgataaagttttaattcagcccaggcattctcatagtccatgatggttttgttataggaatccgccacctccaggaccgtgggattataggtccgtatcatgtcctgaagttccgaatactccagcacatcatccttcagtttttcattcctctcctgtcccagatactcctcctggcggtccgtatctccaggtccgttctgggcagccgcggctgccgtcaatgccgttacttctgataatccggctgccagggacaaggaaagcatagtgatgagaaaacgcttccttcctgttcttctccttttttctgctctgcctgttatcctgtccattctatttccgcacctcctgctctgcctgctccccgccgtctgtcctgcacgtccgcccattgtctcctactctgccgacgccagccccttcaccgaccagtcataggtttccatggcctggaacaggctgacggccgccatttcggcatttaaacggctgctttccattttatactcctgctccttatattccaggctggtcatcatgccggcctgaagctttccggctgcaatatttgtattggtttcctccaactgcgcctctgccaccgcctgttcataggaaagcctggcggaaagcacgtttttgtacgcgctggaaagggatgcccctatctgtttttcattattcctgattttagtttcaagagattcccttgttgtctttgatctggcattttccagcttgcgcttatttattttcaatgtatagttgttttccagggctgtctccagatcccggtccggatccatgccgtcaatgcggcttacatccatctgcggcagctcctttatatccggcgaatcattatgcttccatcccagggaaatgtacaattcctccttcagattctctatccctgattccagttcttttatattgttctcgctgctttgcagactttcctttgcagtaagcacatccactgccgtaaccgtgccggctgcctgctttacctgttctaaactgtatttttcccttgccagctccaagtccgtctgcttttgctccagctccagctgttttttatgataggatatcatgttggactgcgccgtggccgccagattatcctcggccatctcataggtcaggagatatattttgctgtcctccagtgtattgtctgcctgtttcagcatattcctcgcctgaatatccagctgaaggtctgacatcatggaaccggcgtctgtctctccagacatgtcatcgtaaaaatcctgagccagatcattgtacgcgtcagccacatcggaattggtatccccatagtcctcacggaatttctggtaatcatactggttattttgaaccgttgcgttgtattcatgaatcaaatccggaatttcatcgtattctattacattgtcctgcagccgggcccactcctgctctgtcctggcaaattccggactggctcccagggctgccatgggggacaagccccccatgacagctgtcagcgccagaaccaggatgcagcggccatttgccataaaggtcatctgtggtttcattcttcactcctccccttatcctttctgtttctcttaaggttcttcttaaagctgcctgcaattaccggccagggttttctcccgccgcctcttttttcctttatgattttcctgtttccgctcatgagcttatagtatccgggcagcatcagcagacacataaccgtggaagcggtcaaaccgccaatgtttacaattgccagtccctgggtcatatttcctgagtttccgatagccatggccatgggaatcatggaaatgattgttgtcagggttgtcataagaatgggcctgattcgggttgctcctgcttcaatcagcgcggtgtccatgtccatggtctccctgtactggttagccgtatccacaaacagaataccattattcaccaccgtaccaattaacatcaaaaatccaataagggataccatactaatcttacagtttgttaaaaacagcagtccaaaggctcctattaaactgaatggtatggtagtcataaccatgaaggaatacctgggcgactcaaactgggccgccataaccacgaatatcaggaatacggccgttccgatggccttataaagggctgaaaactcctcgttcatagaactgtcaatggaattgaggcctatactcacagacggagtaagatttggcgttaccacttcctggttaatccgcatcttggtttcccttgtggccagctctgtatactcaccgctgattgtcaccttatattccttgtcttccctggaaatactggccgggctgtccacgaactgcacatcagccacatccgtcagcgccactgagcctccgcttcccgtggtcagaacaaggccctttacctggtcaatggtcttataatcctcatccgagtattccacttttacatctatatcgtttccgtctatttcaatttcagtggattccacgccgctgatcgcattgtgaaccgcgcttcctattttggacgcgcttaatcccgctgcctgagccttcagggcatccactcttatctccactaccggagaagaattttccagatccgaatgtatctttgtcacgtcatcccgctccataagctgggacacaatcttattggagatgctctttacttcgtcataatcagcgcccttcagaatcacttcatagctttccagggccgaggacatcatgctcatggatgagctcatttccacggatatatcgcagtttctcacatccgccagctgctttttccacatcttaaccacatccaccgtatccatgtccctgtcgtccttcagatacgcgtttatggtagctgaatcatcagcacgtattccgcctccgccgtagctggtcatgtacgattccagattggaatcctgaacaataatcccttcgatttccctgagaatctcatccgctttttcagtcataagtcccggtcttgtatcaacagatatcgtaatctcgccgttatcatctgagcccatcagctccatatccagttttgttgccaggaacagagaaaacatcagcaatcctatggaaatgaacatgacagtcttttttttaggcagtatcacgcgcatcgcgctgcggtatgtgtcctgaagcctgtaaaccggtttggacaaaggcgccttctgtctttccctcggcctgtatatcatatagcacagcggaactaccgtgacagcggatatcagggaagcggtcagacagaatacaatggtaaatccgagaggtttaaacagctgccctgtcatgccctcaagaaatgccagaggaataaataccacgcaggtggtggcagtaccgccaagtacggaagcgcccacgacccgggttccctccagagcgttgtccataaattccaccagacccgcctttttttcagaggaagccgtggctctgaaacagctctccagcactacaatcgagttatccaccatcattccaacccccagggtcagggcgctcatggtaattacattgagtgaaaatcccatcagatccataagtataaatgctgccagaatagacactggtatggaactgcccactatcagggaggctttaatatctccgaaaaaaagccatatgataatcattgagatcacaaccgccatgattaaggtttcaacaacagacatcagggactccataatggaatcagatgagtcgtccaccagaatgatattcaaatccgggtcctctgccatcagacggctgatggtcttttttacctggtttgacagttccattgcagtagcgctctgctgtttgctgatggaaacagaaatcgtgtcgtttccgtcataacgggctatactgctgctggagtccgtggttgtatatacatttgccacatcttccagatataccgtatccccgctgggcacagtaagaggaattttcttcagattttccactgtgttataggtcatgcgggtggatactgacagctcctgacttcccacctgcgtatcccccgccgggtaggaaaggtctgcagcctggatatccgacgcgatagaagagatagagaccttatactggcttaccttttccggtatcacctcgattttcacgtattcatccgaaccgccccgaatgcttacatcagcggcaaccgctatcttttcaaactccggcaccagctcgttgttcacgtagctgtacagattgttctgagacgcattgtcaatggccagagtaatatccgcggctgaatccatgttcagttccataattaccggcgtatccgcgtcattcggcagctgagtggtcaccagatcgatttttttcttcaagtcatcatacgcctcatccgtatccgtaccatactcatactccagcattaccatagacataccctcgctggaggcggatgtaatggacttaaggccgctgagagaccccacctggtcctctatctctttggttatcagatcatttacgtcctccgggttggctccggagtagttagttaagaccagaagcataggcatatccatttcaggcgtcagctccattgtggctccggttaccgacgtataaccaaaaaatataaggcagagtatgcacattatggtagtcaccggccgctttaggacatattttgttaaattaatcatacctttatgtcccccttactgttccgttgtctgttctgttgtctgggtttgtacctctgtctgtatctgccccggaacctgctgcggctcctgctcttctcccagcacccttacctgtgctccttcgtacagctccgagctccatgttgtaataacctggtcctccatggtaagtcccgacaatacttcaattgtctctgaatcgtagataccagtctcgataaataccttgtggactgttccgttctcacaggtatatacatagggattgccgttatcataataaaccgaatccacaggtatggtcattgcatcctcggttttttcggaaaccacgtaaagctttacttctgaaccagtagggaatgtatcgccatcctccagcctcgccttaaccttgtaaaggcccgtggtgctgtccgccattgtgctgacctcataaatggcgccgctgccttttattccctctttttcaacctctatttcatcgccttcatgaaggtaaccccgtattctttccgttgccgaaaaagatactacccgtgccccctggccggaaataacacagatcaaattattctgggatacggtatcaaaaacctccatgtcgcagatttccaccaaaccgcttatgggagctgtaatctgactgtattccagctgggttttgtatgtaaactccgcctgctcatactggatccgggcgctgtccaccttgttcctgtactgctcataggcctgttctgaaatgccgccgctgttatagagaatctgctgccttcccagttcggcctgggcctccttaagggtcagggccgctgcttccatggagcttttggctgtctccacctgttttgtgtctatggtacatatgacctgtccctctgtcacaacatccccggcctttacatttaccgacgtcacatccccggctgccttaggataaatgtaaaccacatccgaaggctccacctttcctattaaacttgtggtaagccggatatcgcctgtctggggatatgctgtttccatcaccggaagcgccactgcttccgcaaactgtttattattcatgaatctgggaataactgccgcgcagataaccaccgctgcagccacgcccacaataacaccttttttcatcatacttctcctctctctgggctacactgtctgttgttttacttccggcctgatataaattattttgttatggaagcaggccataatatcttcctttttgcctgcgcctgatatgtattcctggatggaaaccgttaaaatgtcattgcaggtatcctgatacactccgaattcatcttcggaaaaccgctccctgtatgcaggcattaaatgtctataaatccaggctttatattccatgtactctttcccatggagaagcgaacgggacaaaaggctgaaactctcatttccctctatcggcagataaagcaggcggtacaggcggttggtcctgcatatactgaaatgatatctcagactggtctccagcattttccagtaatctcccccgtattccagaagaatcttcttgttattttcccagataaaccgctgcgtctggcacagcgaaaaaaacagcatatcttctttgctgagaaaatatgcatacagactccccctggaaacccgggcgcttctggctatctgggtaatatggatatctcctgttcctctgtgcataaacgcctcactgatggcatcgcttatcctgttttttttcagttccggaagcttatcaaaacgttctgtgggcatattgttttcctcctcattctttcacggtcccagtaaaacggcacgttttatatacagaccttatgttactaaacttaaatgaaccatcattaaacccaagatgaagtcaacatgaagtcacaaaatgttcacattttgtttatctgtccgattcatgttcggttcatattcattgtgtataatgtccatatgattttaatctgatattgaatgattggggaaaggatgaaaaacatatgctgatgctgaagatattgattgtagaagacgatgaaaaattaagccagctttataaaatcgtattaaacaaagccggatatgagacagttctggcttccaacggacaggaggcatgggacatctttgatcaggaacatatcgacctggtcataaccgatgttatgatgcccgtactcaatggttatgacctggtgaaaatactgcgcaatgaaaatccgctgattccagtgctcatgataacagccaaagatgactacccctccaaaagcaaaggttttactttaggtattgacgactatatgaccaaacccattgatgtgaacgaaatggttctcagggtaaaagcactgatgcgcagagccaatatcaaccaggaacgcaggctgatggtaggtgctacctgtctggattatgactccctgacagtctcctgcggggaggattccatcatgcttcctcagaaggaattcctgcttttgtataaactggtttcctatcccaacaagattttcacacgcatccagcttatggatgagatatggggacccggcactgcctctgacgtacaaaccattgatgtacatatcaacaggctgcgcaggcattttgaacataaccatgattttaaaataatgacggttcggggacttgggtataaggcggtggtgcaatgaagaacggtatcagactgtggcttagtctttcaatccatgtcatcataatcatgtttgttatggtttttataacaggtacgctttccttccgatttttttcatcggatatccacagcgtcaccgcccgcctgtttccgcttatatccctgctgatagcagctatactggtatctgtttccctgattctcatcgtgtcaaagcgtcttctggttcccatccaaaacctgatcgaagctcttcaaagggttgctgaaggggatttcaccgtccggcttcctgaaaaccatgaggatgcctatgcgtataatatgaacgccaacttcaacaagatggtaaaggaacttaattccatggaaatgctccagtccgacttcatacaaaatgtgtcgcatgaattcaagacgccccttacctctattgagggctatgccaccttgttaaacggagtctccctcccggacgagctccatgtctactccgggcatatccttgaaagcgcccggcagctctctgtactgaccggtaatatcctgaaaatatccaaactggagaatcaaggtatcgtctcccaaaaggaatcctttttcctggacgaacaaatacgccaggctcttctcagcctggcgcctatgtgggaacctaaaaacctggacattgatatggatctgcctgaaacgctttactatggcaatgagaacctgatgttccaggtatggacaaaccttttttcaaatgcagtcaaattcactccacccggaggttccatcagcgtccgctgctgtcagacaccggaagtcattcaggtgtgtatcaaagacactggcgtcggcatgacaccggaggtacagtcccacatatttgacaaattctatcagggtgagcagaaccgcaacattgagggcaatggccttgggctggccctggtcaaaaaaattgtcacactgtgcaatggaacagttgctgtggagagccggccagatgagggatccgtgttcacagtccggcttccaatggacaagtaatgaaaaacagagacttcgccgcatcaatttctggataatatctcccacatggtgcggtaaatctccatgctgtccgttaaatttctgattctgtcaacatcattttggtctttacctaattttataatttccttgaacaggtccagatagtccgtttcacctttctgcgaaaagaagaacaagaggtgaaccgtctcgccctcatcaaacaggataccgtcctttgataccaggaggctgagcccgtcctcgtataccccgctctccttcctggcgtgggccagcgcgattcctttatttacaatgatgtaactgccgtactcctccacatttccaatggcttcccgcacataacgttcatcaaagtatccgtctctgatcaggtcctcggaggcagccttcatagcctcccgccaggccattttcccgtcccttgccttgatatactttattttaagcatgttgagcagcgcaaactcttttccaatcttggactctacatagaaggcatcctccagaatctgcttgagttcacggtccagatattcgattttccgccggtcccctgaatcatagatcgcatagatttttgagagcaccggaaatcgctccctggcatccggcagaacagtctttttctgtttaaatgcaaggttttgtatcttgttgatatcctccaccgtgatcaaagggctgaccacagccacaggcagcacgcagtcctgaatcggtaccgtggatatgacaaagtccacctggtcgaaacagccctttgacgcctccacctgtctggtggtcatggtgtccaccacataaaaattgaagtaattcttaatctgtgcttccagatacttgctggtagccatgcttcctgggcaggatataataactcccagggggctgctgttcttcctccctctcagcagggccgcgcatatatggataataatgctgtctttcatcttgggtgtaaggctgtattggaggtacttctccaatatgcagaacttatcctccgcaagctccctgatacgcgggaactccccggaggtctcataccctatgtcccagtcataatccgcgtcattccagttattcatgccctttacatgggaaatcagcgattccaccagcagattgtctgactggatatccacatctatttcccggctgatttccagcaggaaatggcagatcacaccatagagctcaaaatcattgatgctctgtacctggggatgcagatttctcagaagaatctgcctctccataaccagaatcccgttatgccctatggctgagtatcccagctcctccgccacataatgtatcatattgccaatggtgtccagctgcagctggggcaggccgggttctgtggaattctctgcaaatccggtctgctctaaccggttgagcaggacaaagatgcagatggcaatttcaaaaaatacatcctttgcaaatatgatattgttgtccttggtgaaacagttcatataatagatgacatctgtaagagggcagataaaccccgcccgccttataataaaacgtacaaaaaaatccttctcgcattttatggatggaatcagacccttaaatatgtcaatcagcagcccgcgggtcttatcctcctctgtctggagcaggattcccttcttacttttggccacaaagataatcccatatttttttacatattcatccaccagcctgcagtcatttatgatggtattcctggtgacatacagttcgtctgccagctgctgcatggaataataaccatcatggcagagtaattcaatgataatataaaccttccgctcctccagcgacattttatactggtatggatccatggaatacactgcgtccatgaactcactgatatgctttcggtcatccagacgcagtatgtggttgtcccagtatacagagtgtccgaaaccggattccctggcaaattccacaagctcctgcacgtcgccttttaaggtcttttcagttatgttatagtcatctgtcagttttttcaggctcagctcctcgtttggattcttcagaagccgctgtaatatctcggtacttctctttttcatttacacccaccactttcaaattagtccaaccggccagatggactgctgcgtctctacacgacatctgcagcgtcccctgatccggaggcgccgcaaagtcttttcccttaaatccggctattcccttcaagcacctggaaaccggaccattttatattttatatactctcccttttgcacttcatcaaccttatgtctgaacggctgcgctttactccgccgcaaccttcttcatcagctcctccagcttcttttccgtattggccttattgaccccggaaatgagtccgaacacgctcatgtacggcttctccagaggctggcggtaattggccgtggtcagcacaatatccacatggtgctgcctctccggcacttccgcaatggtggccttaaatacctttgcattgacccctgccctctgcgctatttcctttactgcctcctgtgcgatggttgaagtcgcaactccgctgccgcatgctactaaaattttgatttcttttgtcatgataccttctccttttctacagtgttattgtttaatgttatatgactcatatcccgccccatacatggattctttaaggttactattcgatgcttgcatggcgctttgccatcttcttgttcgtatccgcattttttgaactcatcttaaggatgaccgcgtcaaaaatcagcagcagcatctgctcaaacaaactgcccagaggctggatgcttgcctttgactcagaaaacttggtggcggcctcaatccggataagcggctcatggttcctgctcagtgtggattccttgctgccggtgatcaccagcacgtcggttccctgcttagccccgtcgtctgccgcgctgcacacgctctgtgtctctccggaagccgaagccacaatcaacaggtccccttttcccacggaaggagttgtggtctcccccaccacataggactgatatcccatctgcatcagtctcatggccagcgcttttaacatcaggccggaccttccggtcccgtatacaaagattcgctcatgagtgtcaaccgcctctatgaactggtcgattttttcttccggcatctgcacggaagcattctttaattcagcgacaatatccattaattccataaccaatctcctttttcatctcttacgtgaaagggatttccctgactatcctatcttttcctgtaagtattcaatcagttcctcgtctgaaaggctcttgcattttaacagagcttccgaatcatttaaaaaacccatcatgttctgcagcgcctgaagatgttcattgggatccttgattgccaggttgaaaatcatatctgtactgacatcctgggtatcgtcatccatccgcttaaaagaaacaggccggtccagtttgaggaaacaaacactgttttgtgtgatgctctcatccttggcatgcgggatggctgtaggaatctccgtgggcagtcctgtagggtaattcttctcccgttccacgcacagagtcccaaactgttcgctgacaagtccttccttatacagagcctcaccgcacatggtgattgcctcatatctgtccctggcaaaaccgtgaatcactaaatatctatttttcatactaatctcctattcttaaccaagcattccaaacagtctgtgcagcagggataccaacaggttgcccgggttccagccaaagtgggatgcggttaccagtccttcaaatttaacgccggtgacagacagcatctgcgttgcttcgggtataaacatgttcgcaaagaacaaggtaatgaacatcatgactgtcatgcagatcagagtcctgaatatatttcccttactggtcagcacacacataggagccagatagcaaacctctgccaggattcccagagggaaaaacctcatatcgggaatcaggaatgccaggaggatggtgaccggtatcataatggccgagcatgtgatacaggccgggtctcccaatccaagggcgatgtccataccgatgtaaatatccgcgtcatcgccaatcttcctgtgcatgtaatcattggcagcattgcccatgggagtcagaccttccatcataacgcttaccattctgggaatcagcaccatggatgccgcgacacccatgccgatggtcagtaacgcccccaggtcctgtctggtcagcaaggccaggaatacgcccaccagcagtccgatgaccgctgggtctccaaagattcccagtttctttcccagcttatccacattgacatccacgtccctcaggccgggaatcaggtcaatgattttattgagtccatatgtaacaggatatacccaggcgcagaacgccagcgtggtacaggtggttccttccagtccgaagaattccccccacttcggggccagccactgggaaaagaacaatgcaacgatgccgcaccccacggctaccaggaaaccgataactgcgtttcctgacagggcatatgccaatgcgccgggtacaagaaaatgcatgaaattccagatatccacattcagtacctttgtaatcttcaggcgcaccagaatcagattcacaattatgatggccgggatgacaaacacggcaaagggaacggtccaggatgcagcccccagcgctgcaaacccaacctccagagcgtcatatcccgaccccagcgccttatagtagtccatgaccggctgtattgttgtaatcagcaggttgaccgccagaaccagtccctggaaaccgattcccaccagtaatccggacttgatggcatggcccagcttcatcccaaagaattttcctaatatggctatgacaaccggcagaagtatggctgcgcctaaattgataaattcctgaaaaaatcctaatattgcctccattttataccccctctttttatctgtaaaccttctttattaaaatcaggctatggtacggccgccgtcaagaaggatcgtctgcccctggatgtatgaattgtccttgtcagccaggaacaccgccaggtttgcaacatcccggaccgtaccgtagcggcgcacaggaatcttttccagaacagcgtccagctctgcctgggtgggataatttacacgcatcatatcccctgtgtcaatcaggcgcggcgcgatgatattgacatttacgccttttggtccaagctcctttgccagtccgcgcatcagcccttcgccgcctgccttggaggccggataggccacggctccgcctgtaccgcttaaggctgaaccggaactgatgtatacgatggaaccgtggtttgtgaggaaatcattgtaaaacgcctttacggtattgaacagaccgtttaagtttatgctgatggtcctgttccactcctcaaatgtaaattcatttaccttctttttgaaggccaccccggcgttgaggacaagggtgtcaatccgtccgaactcctcaaatactttctcccgcacatggtccatatcttccggctttgacacatccgcctggacaaacagagacttcacataatcacgtgtgatttcttctgctgtctctgtaccgaattccacattataatcaacaattacggtattagctccctgctctgcaaactgtactgcgatctgctttccgattccatgtcctgctcctgtcaccaataccacttttccctcaaattttttcatctttataccatcctctctattcttgtggtgtcatgcctatcgttccatagccctgccgcagcttctatttcactgcttcccgcagtatgctgtagcgctcgtcgggattgcctccaaagagatatccgccgactacaatcagctcggctcctgcaccggccacctgctttgctataacatcattgacgcctccgtccacctcaatctggatgggacggctgccaatcatttttttcagattggcaatcttttcaaggctcttttctatgaatgtctggccaggtgtccccggattgatggtcatgataagaacatagtcaatatcatccagcaagtattcaagcactgactccggtgtgcccgggttgagtacgactccggcctttcttcctgcttttttgatgcgctggatcatgttatggatgtgaggcgtggactcatagtggaccgatatcatctcggctcccgtggcaatcacatcatccagatggtcctttggatggtcaatcatcatgtgcacatcaaacatcattttagatgcctttttcatagcccctatctggtttggcccgaaggcaatgttagagacgaagttgccgtccatcatatccacatgcaggatagccgtgttttcacgttccagaaattcaatctcatcctttaaccgcagaatatctgctccaaaaattgacggtagtatttgagccattgataaacctcctaattaccattcataagaagtgatcagattcatatgatggcgccttgtttttttgttttataattcatgaattatccgctgtccattgtgtgtttcttactaagccttaccgcgaatcaactttatgtttttactatatcatcaactttcttttgcttaaagaccaatttaccgccaatgtgccggaagggaatttactatttgatttccgctcaaatataccttcccgcctttttaataaaaaaagaggctggttcataatgaatcagctgcttttcatatgtgaatataaaatgttagtatttttcaggaatccgaatattagacgcgttagaaaacttatatttttctgtcatatgcttcttcatacaaaccaagatataacagtagcaatccgctataccatctgcaaaggaatccgcgttaccctggtttaattgccggaacgcagcgataacttgtttattgagatgcgaaagtgtacgcctcttggacggataataagcaaaatgatgcccccattcaagaagatgattggtttcagataatataacatataaaggttccagtgtggtatgttttagtatggcttccaacatatctgccagataagcggaaccgggagatgtaaatctgtccgccaactcgtccagctcatctctggtgaaccgcaaagctgcctccaaagccgccggacgaatcagcagggccatgagctgcagggcatgaaggtagcgcaatgccttttctacatatccggaattaagagccagccggtgaattttagtatcatccggttctataacaatagtgcctttgccatttaatgtttttacgaaccctctctgttccagttctgacaatgcctttctgacagtggataaagagacattatactgtccggccagctgcttttcatatggaagatacatgccaatcgaatattctccaaggccgattttcagattcaggtcgtcaacaatcttcgagtaataataatcctggccgcgcatgggattccacgcaaagggcacccccgtttgcacaggacattcaggcgtcgtgtcccttaaattttttagtgtgctttcaatggagtctgtaagagcctgatacatatttaataactggcggtgctttgcagacggatctttgccctttaatatgtctataataacgctgttcgcaggtgcaggcttctgtaaaaagtgtttcctgaaacaggggcattcctctatgaaaaatgagaacttattgtaaaggccaaatgcagaataaagttcgccgaataagggatttcctcctatccttaatatatcatatcccaaattagaaggaatacgccatccgccggtaaggcgccccaaacgcagtaccttcatagcctgtttatagtgcggcataatctccacatcgcagccctgcagggcaaaaacaaaaagggatggcagtattagcgtaaaggtctgatatacctgcaatatagtctgcttttgcttcaaaatttcaaaaacagtattcaatgaatcaggcgtatcttttcctgaaacaacgattggagcaaggcggggctgaatctcaatcagcccttcttcccgcaatgcttcaaaaacatggttaatcgtgtatctgcttacatgaaactgctcgcaatacatccttgaagataataaagaatttccaggaagtatctggccctccaaaatgcgctgtttaatttcgttatatacaaatgtaaattttgtttcctgtggtttcatatcgtatctcctctgtctggattatatcatgaagttccacacttgtcagcatgaaaagctgcaacctatttgcactccttaccaatatgggtattgcacgttgataaagataacctttataataaaaccgtaaaattggcatgaaagagattacacattagggaggaataacgtcaatggcaggcagacaaaaaaatgatactacgatacaatttctgatatacagcttcattgggctccttatctttagtattgttattttcagcattctgggaatttatatgagtcaaaagagcagaaaggccgtttacaaagttggagagatctatatgtccggaatgaatgaacaaatgtcccgacactttgaaacagtaattaaattgcgttttgatcaggtcagcggcattgtctctgtggtttcaacagataacaacgacaaagaggcactatatgaggaactcatttacagggcacaggtcagggattttgactatttagcgctttgttctgctgagggaaatttcgaaactctttacggacacccaatacagccgctcaacccagaaccttttgtagaagcattattacagagtgaacagcgagttgccgtaggtgttgattcagatgaaaatgaagtggtattatttggtgttgatgctgcttatcctatgcagaatggcgatatgagcactggcctgatagcagcggtgccgctggaatacatcactgattttctttccctggaggataaagggcagctgatgtattaccatattatcaggccggacggcagttttgtaatacaaaatcccaacaccgaactgtggcctttttttgaagagctgcaaaagcatcttgctcttgcagaaaacgattcatctgaagaaaattctattgatgaatttggtattgctctgaaagatcataaaaagtatgctgccacatttgaagtaaatggggaagaacggcaaatttatggcataccattgccttattctgaatggtatttggtagcggtaatgccttatggtatattggacgataccataaacagtctgagcagtcagcgtatggtcatgacgttgctgtcctgcgcttctgttctattcattttgacattgatttttcttcggtattactccatgacccgttctcagctgcatgaactggaaaaggcccgtcagacagcacttgagtccagcaaggccaaaagtgaatttttagccaatatgagccatgatatccgtacccccatgaatgcaatagtaggcatgaccgccattgcaacagcccacatggatgaccgggaacaggtacagagttgtctgagaaaaatcacattgtccagcaaacatctattagggctgattaatgatgttttagatatgtctaaaattgaaagtggtaaattgacgttaacaaccgagcagatttctttgcaagaagttactgaaggcattgttaacattatgcagccacaagtgaaggcaaaaagacaaacctttgatattcatgttgataatatattaacagaaaatgtatggtgcgacggtgtacgcctgaatcaggtattattgaacctcttgtcgaatgcaaccaagtatacaccggaggaaggagccatacgattatccctttctgaagaaaaatctccaaaaggagaaaactatgtccgaattcatatcaatgtcaaggataatggaatcggcatgtcacaggattttctgaaaaaaatatatgaatcctatagccgggcagatagtgccagggtacataaaacagagggtgcaggtttgggaatggcgattacaaagtacattgtagacgcgatggaaggaggcattgaggttcaaagtgaaattggcaaaggtactgaattccgtattacatttgattttgaaaaagctgccgcaatggaggtggatatggtgctcccttcctggaatatgctggtggttgacgatgacgagctattgtgcagaacagctataaatgcgctgaaatccattggtataaaagctgaatggacattaagcggggaaaaggccatagatttggtaatccaacaccacagcagaagggacgattatcaaataatcctgttagattggaaactgcctggcatgaatgggattcaggttgccagagaactacggcgcaatttaggagatgaagtacctatactgcttatttctgcatacgactggagcgaatttgaagcggaagcacgggaggcgggtatcagcggcttcatttccaagcctctgtttaaatccacattgttctatgcgctgcgccaatatatgggagttgatacaccaaatagccggacattgaaccagggtatggagctgtccgggcgccgcatccttctcgccgaggataatgaacttaactgggagattgcaaatgagctgttatctgatttgggagtggtattggattgggccgaggatggccagatttgtctggataaattccaaaagtcacccaagggatattacgatgctattctcatggatataaggatgccgcatatgacaggatatgaggccacgaaagcaatcaggggactggatcatccggatgccttatctgttccaattattgctatgagtgcggatgctttttcggatgatatacagcattgcctggaatgcggtatgaacgctcatattgcaaagcctattgacgttaaggaattgacccgcatgttaaaaagatatttaatatagccccgtttactgcatttatgttccgtccacaaaaacattgcaggccctcaggctgcaggaagaaataaagtttcaatccctgctttattaacgcattgctgcagcctgaattcatccgctggaatatcctcctggtgcatcagagcccctgcatatacttttcttcatactctgaaattgatacaggcctgctaaacaaatagccctgcacagttttgacaccatattctcttagaacctcaaattgctgcccgtcctctatcccttcagcaactaactgaattcccatttcactgcacattcttgtcatcatcccaattattatctgtgctcttttatttgaaataatatcttttacaaaccctttatctatttttaatatatcgaatttcactaatgacagcagcgctaaatttgaactttccaccccaaagtcatccattgcaactctgaatccagaatctcttatttgattgattcttgttaccaatgtgtccaaatttgtaaaattggcgctctcagtaatctctatttccaaataatttctttgaacatgatatttgtcgctgatctcttccaatctttttataaaacgatcgtccataaaagtgagctttgaaaaattactggagattgtaacggcagacttcccctgcctggcccagatactcagggttttgcatacctcctcaaatacataatagtcaatcttactgatcaggtatgtgtcttctaaaactggaatgaatttatctggtgctatgatcgctccattttcatcccggtaacgtatcaatgcttctgcacccaccatcctgcaatcatccacatttattttaggctgcaaatacactttgaaattatgattctctattttttcgtttagcacatcaggctcagccaaggagcgcagtatgtcattattatgcctgtagcggcccgttgcatggtgtccctgatagaaccgctttttatcatcatacattaattcatccgcttctttgataatatcctgaatatgagtgcattcttcattccatctgcatcctatggctgcctgacatttgctcttctcaaaagcattttttaacagctgaacattatcgcaaaaggattcctcggtaatatccacataaattattacaaactcatcgccgccaatacggtaaaggtactttgaatcaacgctgtttttcacaatatcagcgcattccttaatcatcttatcccccgtgtcatggccaaaggaatcattaatctctttaagcccattaatatctaaatagaccactcctacagattctttgcactcttttaattcagatacatcctgtataaaacggtttctattgtaaaaagaagttaaccggtctatttggctcatctcaaataacattgtttcattttcatttcgctgcatggtcagagaaagaaaatactggatagtctgcaaaaatggaaccgctacttcagccaggcccaaatcctgattatccaggcctattgacccatttacttttccattcttcatcatgggtacccatataatatttcgtattccctgttggacaagcagttcatagcccttcgggaatgtatcctttatttcttcaatatcattaataaccagctttttgtgcttgtccaactcatccagccatacttgataatcaccgattgggatattctgtaaattgtctatttgtggcaaaacaccttctttacaccattctgcgatgttagaataatactggtcatgaaaccggaaaacataggaacgttctgcagaaaacagtgttcctatatattgcagaacctttgtgattgcgctttgtatgttgcgattattataaagttcccttacacatgcaaggcgtatatcatctcttttcagtcttctttttaattcatttttttcattattagcttctgtaatatcaaaagcaatttccatccggactgtgcgtccatcccattcaatcaggcggtctttcaaaagataatgtttttttattatagggtttgtatactcccaggaatatgtttcatccgctttaagcagcttattggtacaaaaaggacagggttcttcaaatccctgtaaaactttatagcattttatattcggctggctgtcgtcaatctgaaacattctctttcccgcttcattgacaaacagcagttcatacgtatttatgtctgagacatacattaattctgatatctcattcataggcgccattaactcctgggctcttcttgacaactgctcgctcttttttatattttccttttcagcctcaattaattttttccggcgcttttcctggcaaatggtaaaaacagaacagccaaaagccattaatccaaatataatattggtgatcaccagtgactttcttgcattctgtaccgtatgttccgtatattcttcagccgtaaacactgtatcattggctaatctaaaataatcttcactcaattcataaagcatctgattggaaggatctttccgataattgtatatctgcgctttaatatcttcccagtcattttgcatttctattaacatggtttggaattcttcgctatccagttttatcagatttaattcatcactcccgcttgaaagtcctgacaatatgttatccagaaaataaatcaactcgtcatccggtacatgattcaattcctttttaatcagtctctgtgttgctccccgaacgataccaatataatttatgaccctggcattcccctgtaaatcatccgttaaatcaagtgacatatgcgctgtaaatataagagctgtgcaaaaaatgattggaacaaaaaccccgcctaatttcctgattatcctccccatttaatccccctcctttgtactttaaaatttatcgtgttccgtatatgccacattccaaagcggatatcagaaagcagcgggattaaaataagccttatggtgtaaaagtcattcagagataacatccgtttaatgtctgcttagataaacactaactatgattttaaccccttcgtataaaactgtcaaacattaacaataattaactataccaacacatcaattagtttttctgattaaccagtatttttcagggcgtttaataatcatagaaaaagcctccggttaataaccgaaggcatacataagacaattctttctttacttctattctcccaaagcgttccggaaagccagtgccctttcagtcagattttcaaaatcatggctgactgtcagtgattggtttacaagattgctccctatcccaaagcaggcaacaccggcggcagtaaactggcatatattttccggggtcacgcctcccactgctgccatcggaatgtgggatagtggaccacggaccgcctttatgtaggatactcctaaaagtcctgctggaaacaatttgatgatatcgcccccataattatacgcatccacgatctcagaaggcgtaaatgcaccaggcatggatataagtcccagttcctttgtcttctcaatcacacttctgtcaacattaggagatatgatatactctgcaccgcttctataagcctcttctgcttcctctgctgtgagaaccgtaccagcgccaatatgcatacgttcggacaggtgttccttcagcaatgcgattgaatggagcgtctcccttattccctcaggtccgctgtgatcaaaggtgacttccatcatgcaaattccgccgtctgccagagcccgtcccgtatccaggatcagcccggatgggatacctcttacaattgcaactattttttccttcctaatcatctgcagaatcatctgctgcctatttctctcatccattatcctatcctccctaaaaatctccattataaacagctataagcagcgccccgtatccggagagcagcaattctcccgaatcataccctgacacatcagagaatgaaccatcttcctcaaacagcctagtcaaggcgctcctaagaggttccttcccggccactaccacctgcatgtccgggctcagcatgagcgcgctgctctttttaacagcacttatatcagaagaaagcactgctcccagcaggtaaccggcgcaatcttttggagatgcggacagacattggttcagaatacgggttgtaaataccgccctggtcagactggtatcccgtgctgtcttaaagcccttcagcaccatttcccagttataatgagcagaagcaaaggaatggttaaccgcatccgctataatggtatgattggtgatggctgacagcagctcgccggacaaggtggtcagacaccccgtcagtctcccagaccgatccgtagtcacgaacttattgtgcgaaccgggcagcgcgagaaggacagccccttttaccgtgataagagatagcaaagccagtgcctctgtctcctcccctctcataatatccatggattccagggtatccatatccacagcattggaatttttcaggcccgggatgaaatgaatggggagttcaaacacctccggaatgagcacagctctcaccgctgccgcaaaatcctccaatcctgcaggagcctctatatgcggaacctctgtaagtcctacattggaagtaatcataccggatgcataaacagatgcaatctgatggattgtcagattatttctatttaataatgtctggatgccttcacgtatggctccggccagccttttattgttaccctctacagctgtgactctgactccaatttcgctcttataaatatccacacatgccttcttttggttccacagagcaactcgggtgttcgttgttccgctgtcaatggtaatcagatagtgttccatatgtactgctgcctcctcgtgcataaattaaaatactgaataggtcgataaaatattagtgatatatttgtgatatattaattctataataccattctccgaacaattcttccatatttaaaaactcacaaaaaatccattaaaaaaatgtgcatactttacaattttcaaagaaaccgcaaagaaatattgtgttttttaaatatttgtgatatatttcccatataccagcagaaaggagaggacgttggaaaacaaatcagactatgcatatcaggaactaaaaaatagaattatatccggacagatgcctcctctaagtgatgtttcggaagaacagctccaaaaggaactgggagtcagcagaacccctatccgcgaggccatacaaaagctggagaaagaacactttgtgatgatttatccaaggcgtggcacgcttgtcagtgacattacactggatttgatctactccatctatgaagtcagactgctgaacgaaccgtttattgcccgttcagcctgccgctacattgtcaatgaatggattgatcatatgtacacctccttctccacaacatttcatgaaaaggagggcgaacagcagcgggattattacattgagttggaccgggaacttcatgataccctgactagccataccaataactttatgctgaaggacatgttccgggtggtaaatgaccataaccacagaatccgtatccttacatcccaacgcaacatgaattaccagaggtccatcaatgagcatcttgccatcctggaggctctccgactcagagacgagagccagctggagaacgcagtaagagaacatattctcactgccaagcaggaagcctttgaatactactattaacagcggcctgccagaattcagaattttgaataggagaattccacagagatggtttctcctatacttttgcagagtctgatatattacaaatatatttgtaatatatattattgaaaggagaattcccaaatggagagaaaactcataaaaatcgaggaacatgacaatgttgctgtggcggtagagtccataaaaaggggacagaccgttatagccggccagactgaggttaccgcccaggaggacatccccttcggacacaaaatcgctctcagagatatagaagcagaggaagcggttattaaatacggatatgccatcggacatgcctcctgtcccatcaaaaagggctcatgggtacacagtcataaccttgcaactaacctgaaaggcatgctcacctacacttatgagcctgatatcccccgcccggccaatgtttccggtatttcacgtacatttcgcggatacgtccgcaaggatggaaacgtgggtatacgaaacgagatttggatcatccccactgtatcatgcgtcaatacaacggtacggatgctggccgacatggcggccagggaatgcggggaactctgtgacggcatttatgcctatccccacaacgcagggtgttcccagctcggtgatgattttgaaacaacacaaaaaatcctggccagcattgtccatcatcccaatgcaggaggcgtactgttggtaagcttgggatgcgaaaataatgatttagaacattttcttcctgttttaggagaaattgatgagagccgtgttaaaatgatggtgactcaggatgtggaaggggacgaacttgagtatggtatggagctgattcgtgagcttgcccaggaactaagccaggaccaacgcgaggatgtacctgtgagcaaactaaaaatcgcttttaaatgcggcggttccgacgcgttctcaggagtaacagccaatcccctctgcggacgcattgccgactgcattaccgcattggacggaagcgctgtcctgaccgaggttcctgagatgtttggcgctgagaccattctgatgaaccgctccgactcagacaaaacatttcatcaggtagtggaactaatcaatggattcaaacaatattatctggattacggccagcctgtttatgagaatccttctcccgggaataaaaggggcggtattaccacgctggaagaaaaatccctgggctgtatacaaaaaggcggcaaggccatggtgacaggcactctgcaatatggggagcgttgtataaaaccaggtctgaaccttatgaccggtcccggaaatgacagtgtatccataacggacctgctctcctgcggagcccaaatcctgttcttcaccaccggcaggggcaatcccttgggcgcagctattcctaccataaaaatagcctccaacaatgttctttatgagcgcaaggagaggtggatagattacaacgccggagccatactggacggaaaaacgtttgacgatgcagcccatgagctttgggacctgatgatacaaacggcatccggtgaacatacaaaaaatgaaatctacggatacagagaaatcatgattttcaaaaacggtgtactgctttaacaccaggaggaggcacttatggcattagagactaaaaaagaaggaaatataataacagaactggcttccagtgtaagacttccaaaaatggtaaaagtcaaacagcttctggaccatagccatattgatgttaatgagattccgggaattgtacgcagtgaacttgatcgtgaggaactgagggcccgaatcaaacccggcgcaagtgttgccataacctgcggaagccgcggagttgccaatatagcagtaatcatccgggccattgtggattttgtcaaggaatgcggcggaagtcccttcatattcccggctatgggaagtcatggcggagccactgcccaggggcagcgtgaaatactggccagttaccatgttacagaggacactatgggatgccctatcaaggctaccatggaagtggttcaggttggcgagacacctgacggtatgccggtctatgtagaccgatacgcatatgaggctgacgccatcatactatgcggacgtgtaaaagcccatacggccttcaggggtccctacgagagcggcatcatgaagatggctgttattggtcttgggaaacaaaaaggagctgagacagtccatcgcaacggcttctgcgaacttgggaccatgcttcctgtcattggaagggtcgttttggaacatgcgcctgtaattggagctctggctttggtggagaatgcctttgaccagacctgtatcatcaaaggtatgctgaaggaagagatatatgaagaggagcccaaactgctaattgcctccaaacagaggctgggaaagatttattttgacaacatcgacgttctggtggtggaccggattggcaaagatatcagcggagatggcatggaccccaacataacaggacggtttgctgttccttatattaacgagggcattaaagtccagcacattgcggttctggatctgacagatgagacacatggaaactgcaacggactggggcttgcagacgtaacaaccaaacggctggtggataaaattgatgtggactgtacatatccaaatgtggtgacatccacagtgctctgcacacctaaaataccgctgtttacccattctgacaaaacatgtatacagattgccctgcgcacctgcaattatattgaccgcgaacatccgagagtggtgagaataaaagatacgatgaacttagaggagatttacatatctgagtccatgttaaaggaagcggaagaatcaaaccatgtaatcgtatccggcccgccgaaagactgggtttttaacgaagatggaaatctttggtaattgtttttattcagataatgaaccgtaccgtggataggtacggtccacatataaaatcaacatctattggaggaggatattatgtcaggtacattacttgtcgttaacttaatcgttgcaatcgctctgatgattgcgcttatacttatacccaaactgaatcccgctatcagcttagtcattgccagtatctatatgggcgtatcctgcggattgggttttgtcacatccattgacacgattgcctctggttttggcaatatgatggccagcataggactgcctatcggctttggagtgattctgggacagctcatgagcgataccggagctgctaaggtaattgcaaaaaccattgtacattctgttcccaataaatttgtactgtatgccgtggcaatagccggattcatactggctattcccgtattcttcgatgtaacctttatcatactgatccccattggcattgcagttgccaaagaggtgaacaaacctctggcctatgtagtaggagctctcaccatcggagacggcattgcgcagactctggtgcctcctacccccaaccctctggctgcagcggatctgctgcatttcaatctgggaaccatggtaatcatgggcctgattatcggagctatcgcaacggttgtttccgtatttatctatacaaaaatacatgataccggcttttttaaacctgaaaaggatatgaaccccaacgcggaattgttcagcgaagaaaaagaattggaatcatataaacagccctctttcctggtatcctttcttcccatactgattcctgttgtatgtatcctgacaggcacaggggctgacgccatctatgacgagacacctatggtagcccaattcctcggcaataagatcattgctatcctgttgggaacactctgttcctatctgattggttacaagtatctgggacgggacaaggttgaggcatccgcaggagaggcattaaagcaagccggtattgttctgctcataactggagccggaggttcatttggttccatcatctcagccactgacatcggaaatgccctggtcacaacattgagcatcaatagcggttccgtaataaaggtattgttcctggcttattttatcggctgcatattccgtattgcccaaggttccggtacagtagccggtattaccgccatgacaatcatggcgaccattgctcccagcgtgtccatccaccctgtctatatcgcactggccgcactggcgggaggaatcagtgtgggacatgtcaatgacagcggtttctgggtcgtaagtaatttatcgggatttaccgtaaccggcggtttgaaaacttacactgtagcacaaatcatcatgtctatctccattatgatattaacccttttatttgcactgatacttccaggtgcaattgggtaatattatgtaagtgggggtgtcgcaaaatcatcaaaatagatgattgagcggcaccctcgctctgtatatagaaaaatcaggagaaaatcattttcgatcgactttctcctgattttgggtatactttaataagcatacggcttttcttgtatttatgcactcgcttttagatcaaacaaatagcttccagtccgctcattctggatttttctatgtaggggcagccggtgcagtcctcacattcgtatactgtcacctcagactcatacccacttttgctgcgctgctttttcaggcagatcacccgcagttccttttaaaactccttttttccatttttcataggtttgatgtatggctgctgcccctcctcccgcagatagctgtacccttcttcactttcatatcctgaatcaacggtaacactcggatagttaaaacccagaaaccggaacggaaccgggcaatggtactgtgatccggcgctttttgtccggctaacaaccacatgaagttggtaggcctgataaagctttgtatagtctaaatcctccaattcgtggctcagcagtcagaccaaatcatcgttcggaaccagcccttccaaacttaatggcaaaaccagttgatacgtgcggccaagttcggtataatctttagtagtgtaattatttattcgcgtacttaattataccacggatggcggactcttcggagcctgcttttctgtttttatacagaaaaggagctgttactccagtagattatttatctacttttgcgacacccccatctattctttgcacatatggtttagaaacaattctcacattctgtagataaccactccttttcatgctatactaatttacatataatgattgacgcgaaatgaggtgccctgcatgaaaggcaatatggaacggtatcaagttgtctacagtgttttaaaaacacacattcagtttggaatctatgggtttggtgatgttctgccttccatcgaaaacgccgccgctgatttctttgtctccgttgatacgatgcgcgcggcttatcagcagctgcagcgggatggcttggtcaccatttccacaaatatagggactacggtagtcaggaattacggaaaagaagaaattgaacagaatattcagatgttctatgcgcagaggaaaaacatcctgattgatttaagtaaatccctgcgcccgctactgggccatgcccaatggattggttttaaaaacattcctgctgagatttacggcaatctccgccagcttgaagacagccattcactgccccagacaaccacgtttgaacatgttgtccgggcttacactgcgctagggaacaatctgcttttccggcttgtctggcagattttcatgttctgtgaaaacccattctttaatatgcgggataatccatggcgtacctttataatcaaagattttctcccgcgttcttgggattgctgtataaaacaggactgggattgcctgcgggaattggtttatgcttctcaggacagcctgtctctggcactgtgccggttttatgatgaaaaaatcacgatgcctccgccggaacaggaagtcgcatttcagtggaattcttataataaggcatcccagatctgctattcgctggctatggatttacttgtttcaatcaacaatggcgtgtaccctgctgatacccttcttccttctctcaacaaattgtcccaagagaaacaggtctcagtgagcacagtccgcagggcgctttccctgctaaacggcgttggggcaacaaaatccgccaaacggattggcacaagagtcctcccttcacatgagattgtaaaaaactgcgactttaaaaaccctgccgtccgcaaacggctcctggatatggcgcagagcctgcagtttctcaccttatcctgccgggacgtggccgaaggcaccatacaggccttgacagaggacggcctgcaaacatgcagaaaacgtttggctgctttaaagaatagtcagcagtatgaattaatcggctacgctacactggagcttcttaaatgctttgccccttataaggccattcgtactgtctacaaagagctgcttcagctgctcttttggggatattccctgaaagacatatggaaaacggatgagggcagaatccactactatctttcctgttttgaggaatttgaccttttcctggccgaaaaagatgccgctggtttttccatgaaattagaggagctaatggccggggagtttcattttacaatagaaattatgatttcgcagggaattcatgaagcaaaaaagcttttggttattggtatatgatgtaaacgtcagaacgaaatgtttctgtacctacaaaactgcagacaatacgtctgcaagcacgtccatatcaatgggcttaccgacatgtgcattcatgccggattccagcgctgcatgcacatcgtccgaaaatgtgttggcggacattgctataatccgaatactccctgcctgcggatgcgtggatttacggatgcgcctggcagcctcatatccattcatgaccggcatctggatatccatgagaatcgcatcaaaataaccggggtccttctcttcaaacgcctttaccccctgcgctccgtcgggagcgcattccacagccgctccggatacctccagcagctgagaggcaatctcacagtttaactcattgtcttccaccagaagaaaacgcctgcctgtgaaaatatttcgggagtcccgtgggccagtccggccgcaaagctcgtcatccgcttccttggaaagcggaagctctacctccacggtaaatacagaaccttcccccaaacggctttccacataaatctggccccccatcgccgctatgatatttttagagataacaagacccagtccggttccctccgcctgattttgatgccggcttctctccctttcaaagggcagaaagagttttggcagaaattcagggctgatgccgatgcctgtatcagctactgcaatccggtaaacggcatggcctgaatgcttctgcggcagttctttaaccgttaacgtaatggttccattttcaggtgtaaacttaccggcattggaaagcaggtttaacaagacctggttaaacctcagggaatcacccagcagatattcatggcggatatcctttgtttctgtcacaaagacctggttttttgcctggtactgcgggtgtacaatcgcaatattcctttgaatcagctccgtaagggaaaatgattccgaagtgaggaccagcttgccgctttcgatttttgacatatccagtacatcgttaatcaactctaacaaatgtttcgaagaaattcctatcttatacagacagtcctttaccttttcacggtcctcaatgtgaatctccgccagctttgtcattccaacgattgcattcataggtgtccgtatatcatgggacatgttggacaggaacacgcttttcgatgcattggcatgttcggctgcggcaaccgcggcatttaaattttcccgtatctgtctgtcgtgggttacatctgtaacggcaaatatgtactttagttcccccagcagttttacaggcagggcagcaatttgaatccacatttgtctggacagcagatcgttatacaccggaattgtttttactgttttctcatcaatccgctcttttaagacactgcatagcgtctcataaaagctgccggaacaccggccacagtcttctccaagattctgcggtttgatgcccagtatcttctctgcattttcaaatgcatactctacctggccggtatgcccgtccactataaaaatagcggtatcaatgttttgcgcaatcgcctcattgatattttgaacgtaccgttcgtagtcccttctttttttattgcgcagcagaaaaaacgcagcaataacagcaactgaaaatacgattgccgcggttatgataaaagccattttcatggtgtgcatgataattgccgtaccgtctttttccaccatgctcaggggaataaccgatacataataccagttttgcttctgcataagaggcataaaggtaagaaactgtttctctccctcaaagtcaaataccgccgtaccgctggcctgggaccgcagggccgctgaaaatttccggatggattcctcatcattttccccatcctttaagacatcctgaatcgtactatatatctggagatagctgaaacggaccggggccagcacaatcgaaccgttatcatccactacatagctgtaaccggcatcattgtatgtagaaccgtggtaagcattctgcagtaattccacaggatatgcttcatagagaccgcctaccactttgccgtctctataaatcggtatttgaaacattatctgacgtcttcctaattctcccagaaatacatccgtaattccctcgttcccctgcagcgcttcggtgaatagttccttcttatccgcgaagttcttattcatcccccctgtgtcctgataggttccattcgtatcaataatccacatgcgggccgccccgtgcttttctttataatcttccagtaattccgggtaggcaaacaaatcatcaaaggccccaagatttgcggcaaaggactgaagggacagcagctctgaatgtatcttttcatccagaaactgtgctttgctgacggtcagctccgtaatactcttggtcgtcgtattccgcaccagttttcgaacagactgtacgctcatcaggcttacagccgtcatggctccaatcgccagtaagagacagaggcagctaatataaattaaatacttatacgtttttcttccttcttttattttcaagggtgtttctcctgtttatcatatccggaaatctgttccagctggattttattgtattcctctgcggcctccacagctgtccttccattaaacatttcaagacataattcccgcacaacatcccaactgccaaacttcaagtgcatatcctctgccggaatcctgattcctgatacatatgtatcatatgcaggccgcatcttctcattgctcagcgtaaaatccgagcttttataaacgggcagaataatcgttccattttccatactctctttataatactcgctggacagatatgacacaaactccatggcctcgtccagattatcactgtccggattaacgcagaggcgggaaactacagtaatcagcaatgccgttcctcccggaacgggaattccctgtacatgataatcgggcgggggatttgcctcttccaccaaagggatatattccaggggcccaaaataaaatgcggtcataccggaagtgaaatcagaaatatccttctctcccgcgcgcagtgcatccgcggcatccccatccaccccatccccataccaaccgttctccacagaggtttgaaatgcctcaaatccctccaccatataatccccaatctgctcttccccggaattcagcaattcaaggtgtttttggatatccgggccgtcatagagtttatataatccgttggcgatagtgggaacagccgtagcatgccagcggctaaggctgatcggcgtccctccaagcgcctttatctcagtacagcaaactttaaattcttccagattgtccggcgcttccagtccataccgctctaacacatccatattgacaaataatgcatatgccgtcatattcattggaatgcaatataccgtatccccgatgaccgcctcctccctggcgctgtcgtttaacttctgaaacgcttccagagaagacaaatcctggaaatacccattatgtgcaagggtctttacactgtcctcattgacaataaaaatatcatcgccctttccggttcttaaccgttcctcaagatactcattatagccgtccgcagtcgcgatgccctcaaatacaacatgaacatcatggcttttattgtatttgtcaattaaccttctgtatgatacggctccgctggattttccttccacaggtgcaaaaaaggtcagcgtctttccctgaggcagatccctctgcgccttcggctccacaatattcacctcattcccggaaccagggaaacggtgacagccgctcaagctcccaatgcagagaaccagtgcggaaaagaagagattataactgcgttttatcatgtaccagttctccttataccagcagcttatccaaagttttcatgagagcgggcatatcaatgggctttgccacatgcgcatccatacctgccttcatagcctcctgtatatcctccgcaaaagcattggctgtcatcgcaatgataggcatatggcggcctgttttttgttccagatttcgaatggcacgtgctgcctcataaccattcatctccggcatctgaatatccatcagtacagcgtcataggtgccgtaagccgcgctctggaattcgttcagcacctggacgccgtttgttttcacaacagttcttacaccctgtaacaataacagctcgctaaggacttccgcattaatctcattatcttctgccaccagcaggcagcggcctgtaagcctgtctgccccggacggtgttgaaactcccgttttatccccagattcccctctattgtcttccggggcaattctgtactccatctccactctgaaggtagttcctgcccgttcccggctctccacaagaagttcgccgcccataagctctatcagtccctttgttatgctgagtccaagaccgcttccctcgacatgttccgtattccggttccgcgtaaagggctcgaatagatgggacaaaaacgactcgggcataccaattcctgtatcacgaatcgtgaagcagtaccggacatatcccggtcccttgatcgtggggagttcctcggtcaggaatgttaccgtcccgccatcaggcgtaaatttaaccgcattccccagtatgttaattaatatctggttgatacgaagggcatccccgtaaaagtatggatgtataatattggaagtcctcacatcaaattgcagccctgcttcctgtgcctgctgtcctatgatagaatacagctgttccagcaagtctgaaagaaataccttgtcattgtttaacgtaatcttggactgctcgattttactcatatccagaatatcattgatcaggctcaacaggtgtcgggaagagagagtgattttgcgaaggcaattttccaccttctcccgctcgtccagatgcgccctggccagtgtcgtcatacccataattgcattcatcggcgtcctgatatcatggctcatggaggagaggaagtcgcttttggcccggttggcctcctctgccagcgccagcgcctgctccaatgtttccttgctccggcgctccgcagtcatcgtctctgtcacatcctgacgcacaatacagatcatcttatggtccccgtccccccagagtatattaatctgcttataccggatctgattctcctccagatagggaaggacaaaatcatatcctcctggtctttcctccaggcgggcaagcatgttctgtaatccaaagcatcgttcaacctcctcttcccctcctttcggagcgtattttttcttaatatccgcaagccagctgtcaatgctggcccgcctgggttccaggacctgaagcaccgcctgatgcgtatacagggtaatgtgccggcttcccaggtgaatgattcccagcatctcaaatgtataggccaccacattcagcaacccctgctgttcccttacagaatccgtaatatcagctctggccaggcagacccggcccagccgcaggtccgtggcggaaacagtcagcttcttcgtctggatttctcccgcctcacccaatatagaataggatagagaatagggatcctcctgcttaagccgctccagtatatattccggctccagcattttcattattcgcggcctgtccttgggaaccagctgtctttccatcatgtatgccaggcgttctgagtggcgccctgattttgcacagaggtcgtcttttgtaaatcttccgctcaaaatcgtacagaagtcatgaaacaggtccacatccgcgattaaatcatatcctgaagtagagagcttcttcaaattccgttccgcaatggtctgctctgttatatcataaacggtcaggattccagtgatatctcccgtgtcaggttcttccaccaggtttaccttaaatttcacgtaacggcctctcacatcctttggcagcctgataaaacagtccagctccaattcccgtttgccagcctgaaaagcagcccgggtaggctcgttgagaaaacgattcatataatcccgccgctctttttcatccagaattaaagtagatatgcctgtgaaaaatgcatccctctccgttccaaagcattccagaaggccagagtccgtataatcgctgatttccgtaatctggcttctggtaatattacagtgccccacaatcaaggcatttggtcctggtgtccggtaatgctgcagaatcaattctctgtattgacggcgaatctgctcctgctccttaaactccacggtcaagtcgcggtagctggcatagagaatcacctcgccctccccgcgccggagcatggaagtcatattcttaatccagatatattccccatctcccctttttatccggtatgtaaattcccgttgttcctcaccgctggccataaagtcggataattccgcattcagctgttctacatcgtccggatgtacggctgccatgccgtcctcaccgtatgatttccacacctggtccattgacataccgctcagcatggcataaccgtctgaaaaatactccggcgtcttacgcccatctttttcaatccgaactactgccacacctcccggcagctttctgaccagtgtctgaaagtattgctctatgtgttctttctctttttgggctttcacttcctctgtgacatcccgcacatatttcagataagccggaataccattccaaagagtttcccggaaacgggtactgtaaaaacggccgttttcatggtaatccatgccgtgggcagcaccatccggcttatgactcttcagcgtgcagaattcacatggctgattttttccatacagggcagcatagcatttctgccctatacaatccgccccctgacagagaaacccggcggattcactggtgtagatcaattcataggattccttgtcaatgacataaacacgctccgcagtgtcattggcaatactgcggaacagaatggcgtcttcagacattccggtgaaaacagcataaaaccgcatcgtgtctgctttcggtccaatcctgcggccgcttatgtgaatccacaccagatgcccgtccttatgccggatccggcaggaaatatccatgacccgtccgctatcgaccgcactgcgcgctgccgatagcacccttccccgatctgcctcatatattatgtcaatggtgttcccttttaccagctcattatactcgcttctggtatgcccggaaagggcaagcaggccatcggaaacaaagtccggcaccgccttttttccttgaatctcatagctgactattcccccccggaatggaattaaccaagtgctccattttcatcctggtgtctttcagctctgtttccagatggacacagtcatttgggtaaatacacaaaccacatggaacactgcacagtgtccggtccgggccttccgaacggttccggtaccgctccgtcttcgtctgagccccggtcacatccacaatatactcaatatgggcccgtgtttcctcccagtcaatcatcttgctgctcacctggtaaatcctccgggtaaccggatccatataattgcacacagtaaactctgaagaattcggttcctcatactggcagaaggggcatggacgacagcgcccggccgcttcatagcaggttatacccggacggtaatccttcttcaaaaagagtttgcgggcacgctcattggcatagagcagaacacggctttccgccgaacaaacgatgatagatgccggagcgttgttcaatacggattccactagttctgatgaacttccatgaaatggattttgagacatacacttatcctcctctccggttcagtcaccgcttatttccctgcctaacccggccccacagttttaatgatagatgtaagcatggtcctgattcacattttccgaaccgtcaatcttaaaccggcccacaagttctttcaacatttgcgcctgcccgctgagttcttcgcttgctgctgctgattcttcggaagtcgcggagttattctgcaccacataggaaatctgatcgatttcctgtgtgacctgtacaatagaacccgcctgatgttgagccgcctcatcaattttatctaccgtattcagaacttcatttgtgctttctacgacattatgcagggattctgctgtaatattagcgatttttctccccttttccacagcctgaaccgtaccgtcaatgagatccgatgtacgtttggccgcgtccgttgatttaccggccagcctgcggacctcacctgcaaccacggcaaagccttttccggattccccggcgtgcgcagcttccacagcggcattgagcgccagtatattggtctgaaatgcaatctcttcaatcgtattattaatggccctgatctgttccgtcttggcgccgatttcccccattgccaggagcatttcttccatctgccggttactgaccgccacctgttccccggctttggcagtcaggcggcgcgcggcttccatattggcagctgtctctcgcacctggaatgatatctcgtttatggcagccgcaagttcctcaatagaaccggcctgatccgcagctccctctgaaaaggtctgggcgctgtcagacacctgggcagacccgctgaatacctgatcggcagacaggttaatttcattaagtgtatttgacagactttctctgatatttatgagcgcattttttatagaaacataatcgcccgtatattccgcccgcggggcaaccgtaaagtcgccattactcatagctcccagctgttggccaatatccttgataaccgctttcatactgccgctcatctcccggaacatctcagccaacgtccccacctcatcttttgaataatagtcaatctcaatattcaaagctcccgctgcaagtttttttgctgcatctgtgagctgcgaaatcggccggctgacagctctggacagcacggtggtaactcccatacacaggaccaccataaccaccagcagaacgatcagcatcaccgtggcattttctaacgctattcctgcatcctcattaaactccaaagctttatctaatgcaaaatccacaatttcctgagaagtttctattcctgatttcatagccgttctgaaatcaatatctgcgctgttcttggcttcctctatttttccaccggcaacaagccggttaatttccttccccgccgcctcaatttcgtccaggctttggtacatatccagaatcaactgctggtcaccaagaaatcgtttctccacaagggcaagatttgctttggccctgccgctggaggctaatacggaatcaaaataagaagggtcctcatacagcaccatgccacgtatttcccgtcccatattttgtatttctttctgcagcataatactctgggtggatacagtaaaagggctttgataaagcctgttaacaagtcctccaatgtcatgcaggcttacaattgcaataatcatcatagccgcggatattgccaccataattcccagccccaggattaattttttcgacagctccagattctttaacatttacttcatcctcccctgaaccatgccgtggctctttcattctcaccgattacccaggtatattctttgttcatatgccaattaattgaatcaagtataacaaagattgacaaatatatcaatcttttaagacaattcattttgccggaaattatgtgtgctgagtccgcatgtgaccagcatatcccggggcagcgcttctgcatcccggccttggatttcaggctgcatataacaccctgcgttttctctgttcctgtttacttcggacgcccctgttccagggcggcattacaggtttcatcaattgctttcgcaacctcttccgggctttttgtccctttgagcagatcctggatattgagatagaaaacatcccggaccccctgccagttcaggttgtccaggcggacaatggtagtcaggttgggggaattctcgctataagccttcagcatccaaatctcatcctcatatttgtccataaccgattgattgaccggcagggtccccaacgtatatttcatcaattcctcatctgtatagatatagcggacaaaatcctttgccgcctgaactttttttgtatctccgttatcaaacacacagaaaccattagtagtagcgacaacgtagcctctgccgtccaggctgggaaaattgacagggaacacctccatgcctcggtcgcggtaatcccacaaattggtcaggttagacatacagattgccatctgtccgttataaaacagatttatcacatctacaaattcgatattttccgcattctcaggcacatacccctgttcatccagggactttagccaggtaagcgccgcaataccctccggcgtatttatggcaaaatttccattttcatcatacaggcttccgcccatcgcctggagcagggtcataatatagctgtctccctgatcgttcagggcatacatcataaaaacataggtggtctcgtctgtaatagactccttcaattctgcaaacaccgtattaaagtcctcggtagaccagtgggcaatggtatcctgttccggaataaattcctccaggcccgcttcctccatcatcttcttgttgacagccagcgtattgtgcagctgctgataaggcagcacataaacatgccctttataggagttctgcctccaaagcgtctcactgatatcggaccgcagcccgtcatcaatgatatcatccagaggaacaagccacccttgttctgcccaggcagaggtgttccaggaaccggcataaaagatatctgcggcgtcctctgtgccaattttatccagcagctgctctttttcatccgtataattatagcggtttatctcaaagttcacatcaaaagcggtatattgggcgctgaaccgctctgctgccacctccatcatctcacttatctctgcttcccccacccccggcacgctgcccagcccgataggcggtgttgcaattctaagggtgatcgattccgggcgttcatctgcaggcttcccggaactgcatcccgtcatggaaaagcaggcggcaaagattaaaaacatacacagcaaactctttttcatatctgttctcctttttctatgcggctgattttgtcaatcaacgcagccacatccagaggttttgtgactgcatcgttcatgcccgccgccagtgctctatcaagatcctcctggaacgcatttgcagttactgcaataatcgtgattgttttagcgtcagggtggctgctttgccgtatacgccgggcagcctcatatccgtccatctccggcatctggatatccattaagatcaagtcaaaaaaacctgcttcgccggcttcaaaaatatccaccgcctcttttccgttgacagcctccgtcagaatgcatccctcgttttccaaaacggttgtgacaatcatccggttcagttcgttgtcctctgccactaaaatatgcttatccctgatggaaacggcagtctctctgcctcctctttccctcaaaatatccctttcttttgaaatagggaagggaattgtaattgtaaaggcagtgccctgttccggcttgctttccacggaaatgcttccctgcatcttttccactaaagttttactgatggtagttccaagccctgttccatttttataaattttccggttctcctgctcaaatggcagccagatacgcgtcaaaaattccggactcataccacagccattgtctgcaatcacaaatgtggtaactgctgtcccatttttcaaagtctgtattgcgtttaatgagacttttccgccctctggtgtaaacttaatcgcatttcccagaatattcatcaaaatttgtttgatgcggattggatcgcctgcaatccacttttgtttgattccttgtgtattcacggtaaaatcaatttgcttatgacgtgcctgggtctccagaagcgtttcaacttcagataaaagcccgttcaaatctatattacggcatataagctccaattgcccgctttcaattttggacatatccaggacgtcattgatgatgtcctttaaaaaagcggtcgaagcaactgttttttgcaggtactctgtcaatttttctttgtcatccatgttctcctgcatcagataacaaaggccggaaataccgttaaggggggttcgtatctcatgactcatattagccagaaagcttgtctttgtctgctctacgatacgaagggtcttaacctcatctattttacgatagataaaaatcacaacgaataaacacacaatcccgatcaacacaaaaaacacaagggactgcatcaacagacgctgtacctgatcggtcgtaaccttgtctgaaagctggaccacaagattccatccggaatgatagtcgtccttcaaaggctcaatcagcgtataaaagctctcaccatccacggaaaaccgaaacagctgctgctccccattctgtataccggattggattccctctcttgtacagccttcctgaagttgagtactttctaaaaaattgagataattgttggaaatattgctgtcatagactgtactggaggtgatgatttcaccgttagactgcataactacggtcacgcccatctgatcaaaactttccaaccgcatctgttcagagatggcagaaataggaaccaggccaacaattccagccacagactcttcaccgcatctgacaggttcagacaagcgcacgccataaacaacatattcgccccaatgttcccgggagctttcgcggaaaatccccgcaaagggggcttctgaatttaagtaatcatctttccacgccatatcttcaaggctggttttcagtgcagtgtgggagtatacgactccctgctccgtaaccagatataatctccggaatgttccggaaaccacgttgagctttaagtcttcaaacgcctcgtccatcgtgtattccctggctgcatccacacggttcgtaattgttgtaagtgcaagccatttaccggacatttgattcagcatattctgccggtcatggtcggcaatctgcttcatgaaagacagcgttgttgcataaatgacattacggacgcttttctgataaatccaataacccacagaaagaaaacagagaacagaaataattaatatactcagcgggagaatcttcacttttttctgattcacaggtttatgctcctatccttagtaatttcaaaacataataagctatctattttttattggctctttccccctatttgattatactcccgggcaatatcctccaaagaaaatggttttccaatatgagcatccattccgctgttcaggcaccgcttcctatcctcctccaatacattagccgtcatagctataatccggactgtctttgcatctgccctggacaacgtccggattttcttggttgcatcacaaccgtccatttcaggcatctgcacatccatgagaatcaggtcaaaaaatcccacttgggaagaatcaaactgttttatagcttccttgccattgcaggccgtgcatatatgtgctccggcattttccaacagccccgcagcaatttccaggttaatttcattgtcttccgcaaccagaatattcattccgtcaaagctggcaagctgttcccctgttttttcagctatagcccctgactctaattcgtgcagaagccgctcaacatccgattgaaaggctggacagacaagcattccatcggcatttgtctgatgaaccacctcattcaattcatccttgtcataaccgttaatcacaatccggggcgcacttcccactgctgcctgccggatttcctccacaagctgaatcatctccgatgaaacgttccaccagataatgcagagcgccaatgggcagcctttcttacagatatcatccgccatcaagaccgccgtctccctggaggaggctgtttttacgttaaagccattctgtcctaaaagccctgttaaatatgacctgatatcaggatgatgatgaaccaccagcgcatattttcccataccagaactttccgttggccctgttacacctaaacagccaaacgggagttccaccttaaagcagcttccggctccaacggtactctccgctgaaattgtaccgcccattaattctacaaaacgcttagtgataggaaggccaaggccggtaccgccatattggcgcgttgtacctgcattctcctgctcgaatggcagaaaaatgcgttctatgttttccgaagatatcccgcatccagtatcacggacataaaaagcaatccacagctttttatcttcccgtttctgttcccgcacctccaatgttacgctgccgccttgtggactaaatttcatggcattagaaagcagattagtgagaatctgattcaggcgcagggcatccccctctaatttttcctcaagattgcctgataggaggatattgtaggaaatccctttttgtttggattcatcataaaaggttatcatcagtgctttcaaaagcacactaaagtcaaacggttcatgatgcagctcaatctttccgctttcaatttttgacatatccagcacatcattaaccaatgccagcagatgttttgcggacaggtcaatcttatccatacagttaagcacacgctccacctcacccgcatgctgccggcccaaagcaatcattccaatgataccattgagtggtgtacggatctcatgggacatctgggacagaaaatttcctttagcatagctggcaacttccgccctttctttctccgccaatagaagctcatggtttcttttctcacttctttggtataacaaaaaaaagaccagaataatcagcaggatgagtgcaaatactgctacagccattgtcagcaggaagtgacttaaactggatacctgggaattaacagtatcataagacatgctggtacacaggtaccagtcggtaccctggattggtgaaaaataaatatattcatgccgtttgccaatttttaaggataccattccggattttccacctgtaatcttttccctcatctcttccaggctatattcatcatcaaattctgcctgcttctccagagttgaaaaaaaatttgcgccatatttggctgcctcggaataggtgcttgcgattacaaaactgccgttgcggaaaataatattggaataggaatctgtcccttccttgcccagagccagcttctgatttatgacgctggtatcaattccagccactatcgccaccaggcgttctcctccaagctccatcttttcaacaggtatacccaacaacagcatattagtatcccagataccctcattaaatgaaattacccgcttctctcctgacaacaataaatcaagatccttaattttagaaattgccgaaaaggtacctgtggaggaataggcaactcccgtactgctgatcagtgccagctggtcaaattcattttcctgttgaactttataaaaaagaatctgattcaactccttttcactgttcagctctatttcatgtaaatagtccgcaatcgtttggatttgtacaaacaggccgtccatattagtagaaaagtggctattcaactgctccgtcatttcctgcaggtaaatctggctaatcttagttactgtatcggaagatttactgctgtaaatattcttaactgtaataccgccaaatagaagcacacatacaatgcttatcccaaacagaaggaagatgatcctccgccttactctctctttcagcatggcaccctccctcctcattaatatccttttttcgctaaatcagtaatccggccagtcgtttttttatcaatcattgtatctcgatgcttttcaaaatactgtgccaaagcatcccgataagtcatattagtttccagaataagattgacatttcccctggttgtctgtccgtcgtagcaattaagcatcttatatccatccccattaccttctgcatacccctggcgtcctgccatataatcgttgaccgctacctgatacgtactgttttgatccagctctgttccatctgccagtctaatctctgatactctctgtcccgccggcttcctgctgtcaaagatatagctgaacccggacacatggagaaacctgccgccgggtaaatcatctgttattgtagtcagactgttttccatcatctcccataatgtctttcccttcatttctaaaataataactacgttatcatagggacataccgccgacagctcctctccatacacctcgccctggtacaggctgcttcgaatcccgccgccgttgacgaccgcaattggcgctcccgatgcttcagcaacactgtcggccaggagattgccaatctctgtttcacccaggcggacattatagttttggagaagcatatcatgccctacggttcctatcacggacaggtcgtagtccacagtttcagatccttcgtaataatatcggtccacggcctccaaggcctcctgtaaagtcattttaccaaccagtgtctgccgcacctggctgcccaggtattctatgactctgtcaggaaattgaatgttatagatatagcctgactgaatatattcttccagcccctcagggataaatgcggtatccggctggtaattatgcaggtaggaaacacccatctgaagatctttcataaccgcttcctgtccctccgatgtagaaatcagctccagaacccgctttgctgcctcctgcttctcctcatttacagcggcgttgaccgcaacatatgctgacggtgcaaggaggagccagttttcatttccctcatcgcttaataaaggcagcatccggtaggaatactcaggtgcgattccatcctgtacataggtttgatttaattccctgcattcctgatacagcgatgaattaccaaatgaaactgcaagcgttccatctgccatacgctgtgcatccctgattaagttccgctttcttcccatagcggctgtatccagcaatccggcttcaaccatttgatcggtcagggtaagcatgctctcccatgttccggtgaacgttgcttcctttctccggaaggccgccagccagtcaacgccatccactgtacctaagaagtccggcaccatatagccggcataatatgtgccaagctccgcgttggtagcactcgaaatggagaaattgattccatcctctccaacaccaatccccagttccttcatttttcccaccgcttccaacaattcctgattactgatgggaagcggtattccggccttccggaaaaaggtttcgttgacaatatatccactgtactgaccgggcagcggcaggaaataggtgattccgtcgacctgcagctgctgcatcacagtgccgtcataagctgtgctggcttgtgtatcactgatgtccagcaaatatttttccgaaatctcatcagaaggctgggtgaaaaccaccagttccggtcccatgcctttttccagtcttcgcatttgttcgcttggataggagagcctttcaaattgcagatcaatgtcagaatatgtatcttctaccagcttctctaaattaccgcactcattaaaatacagaatgctaatgactgtctttatatcttccggctcctgtgcacatcccgccaacatgcatgccagtattataaaacaaagacagtgagaagttgcttttttgaaatacaacccagggaaattaacatagctttggactttcattagataatagttttctttcattttatctctccccgctttttcaacggtattatcagcaaccgcagcaagcacgttatccccgaatctgtatccttattcgtcattttgctttttgaagaagtctacagccctcatagccccatgccatgtatagtaataacgcattaaaaaacgaaacaacgcaaataataatgctatatttattttttattagaattataacacattaaatatgtatagtccaggctttgattttgttattctattcagaaagaggtattattatatggatgaagaatttattcgcaaccggattacggagctacgcttaaaaaggaatgtgtccgaatatcaaatgagcctggacttggggcagaatagaagttatattcaagcaatttcttctggtcgggccctcccttcaatgggacattttttgaaaatctgtgattattttgagatctcaccgatgcaattttttgactctgaaatcgtcaacccacagcttatccataaagcgatggatggtatgagaaagttaaatgctgatgacatgattatgctgattggctttattaacagactgcaggcagatgaaaaataggcagacacgaaagcggtgtctgcctcagattttttatctgattacttacaaatctttggaattattccatacgaaatccgtccgcttttttcaagctcccctgcaacatcctccggtatatgatctgaaaaatccaaagaaatccacgcattatcgacaatgccggtgaatgcgttgccataggtcagcacaaagcgttcaatcccctttggaacctgaaaggccacatatccttctgcttcaccaccaggataaacctgttggatttcttctgtttttagagtgtccccatagagtgtccacgcgactacttcaccgccctgcccggtgagtatggtatagctgtccgcatcaaattggggggcattgttcccatccacctcttttacattgactgcgattttcaatacaatcaattctttatcagactctgagagataataataggaggggtgaaggaacttttctgccagctcacctctatatgcttcctgcacacagatattcccggaaaacggggaacccagtttctcatcgcgcattggcatataattcaaatccactgtttcccccatttcatatgggttattccaatgtccctttttttgattgagatccctgattggattttctaaaaaaaccggaccgggattgtaggaggcaaatccgtctggcacatcatatgccttatccaacttgaaataaagcattttatcattaaggctctggtaatacatcgtcggagaatcatccggtttatcaattatcacgccaatccagccggtggctgtacctcccggcgcaatgctgcaaaggtcatggggtctgagatacaaaaggttttcatagccgtattccttgccggttttactgttaataaccccaaagtccattgaatctataatcagtaaagcatcatcgtccaagtgggcggacggtatatttacagtcagattgattaacatatactcctggctgtctaatatcttctgttcgtccaaaacataggcagataagtcatagagctgttcttctgctgcttctcccctcagcacattgttcactttcagttcaatctcatagtgtccgagctcctgtctgcgttgtcccctctttggcattgtcaaataagttatcatctatgtatcttcgctgcaggaagtaatcataggttgctccactttcggaaacaagtttaaatatattcacattccgctcccctatgtctactgtagtattttcctgcacatccgagagggtaaatgtaaatctggccaccataagttcttcctcatcgctgagttccaacgcctcatggtagtccgcatacccgccggcagctgcaaatatatcctgggccgtctctccgcggacaacatcctccagtactatctccgccttaaaacgattcttttcttttaatgcttccgtgccgtcatagtacatcacctgccccacaccggccggattcttctctgtcccatactccttttgcgaacaggaacacaatgccgtgaggcagagcatgacagatacataaagcaattttcttttcttgtatttcatatggtttctccttcgctgaattcattttctcttctgtgtaaactcccggaatactcataagagaaggtgtggcccgcttgaatcacacctccctgacggcagagtttacgtccggtgatatcctccttctgcaatactgaaatatctgggattatacatcttaaaggttacatttcggtttcttttttatctttattaaaaatcatatgaatagcaaaaaggaccagctgcatcagccggtcttttctttgtttatatccaatgcttatatcagatatattcccatgctcttcaattatagtttatagttgcagccaacccccactccattgtttccgtgcaggttgccatccaaatggatcagcagtgattccccggaacctctggacaaaattattcttttatatcaaacgtgtagtaaatgctgacactgcccggtttgacgcatccctccgcctttattttttcagtcaggacctcggtcagaagccggcccgttcttttcggttccgatatctgttccggttccaacacgccttccagataggccactgaatagcttttatccggttctatcgcgcttccgtccaccatggccgcttccgcaatccgcgctcctattctggcattccgctcataacgtaccttcatgcctgccacggcatatggatgaaaatgctctgtctcttccgcctcacgctctttttctgaataagcgccgtaatcaagaatttccagcagtttctcacctttgacctgtgcagtccagcagtaaaccggtaccgtatcattcctttgtgcaatccgcttcacatcctgctctccaattgttcctgcataaagcttcgacaggacaccctgcactggatcaaagcctcctgcttccgacacacccataagagccacatccgttccaagcacttcccgcatggtatcagccttcagctgcgcagtttccagaatgtcaaaattctctgcagctattccaatagaaacttcctcttttacttttccttccataacttccctgcaatgctgcatgatttctttcttagaaatatcacctctgatataagaggtcaactccggctgaaggacaggaatcagactgcccaggacagggcgcatcacatagtttccctgcatgaccgccctcctgattccgtcaaacaccttgtcggcagggataaccgcgcctttcacagtggataccattccgatattgtcctcaatcaataaattctgtccttcatctgtcgagataaactccagaatatccatgaccgcttcccgcttagccatattctcaggctgctccagatattttccagcgccaaaataatatccaaggctcaggagccagccctggttgtccgccaccccatactggggataaaaggcaaactcatccgttccctcttcatttaatgctttgattgtattgatttcagcagttgtcatagccagctgccggttccggagcagttcaagcctttcttcagaactcagcgataaatcctccacgcggataattccctcatccatcatccggctgtatacatccagagtgtcttccaggggttcctgggaagacgccctgcctgccagaaagtcctcataccatgtctgcccctccaccgtagtcatatagtccattgcgagtcttacacagaacacatacatgggcatattggcatgacccaacgggaactcacatccccggatcccggaatcatcgatctgcctgcacagcgccagatattcttcaaaactttccggcacctcccatccatgctcctcaaacagtgttttgttataaatatatgcattaaaactcaggggccccggaacaaaataaatctcccccctctcattctgcggcagcgcattttttgtatagttagcaggaaaagacatggtcgacaaatccatcaggctctccgtggtgtccagaagagcgatacgtccggccttggccatcataatatcgcaggtatccccgctcttaattctggctgtgaattcacactcagcgtaatctcctgtatacaaatactgcaccaggtcaatattcggaaatttattctccactgcctcctcaaagtgaggcagcggctggataccgtacagggtaacggtcactctgtcattttctgtccccggagcagcaaaaccgtcaatttcttcattgtgctttttcccgcacgatgataatgtcagtacagtcagaaccagcgcagatatacaaagataatttccaagcttcatcttcaaggtccctcttcctttattttatattaagacgcgggttatctcctgcatcagcgaaacagcatcaatcggcttggaaagatgtctgtccattccggcctgtctggccatggcaatgtcctctgcgaatgcatctgccgtcatggcaaaaatcgggatacttcccgcatcccggcgattcatgccgcgaatcagccgtgtcgcttcatatccattcataaccggcatctgaatatccatcagaatcaggtcataatatccatcttccatactggcataccggtctgcaccttcccttccattatacgccgcatcaaccgcagcccccgtttgttccagcagttcttttacaatctcctgattaatcagattgtcttccaccagaagaatccgttttcctgccagaatgggcgtttctgcacactccggtctccggacagcttccgtatgaagcacatactgcctgacaatctgctccagtgtggacttaaagattggtttgcgcacaaaaccgtccactccggcttccgaggctttcgtttccatatcagcccagtcataggcggccagaaggatagccagctgcctttccccagcaagctctttgagtctgcgcacagcctcacaggcatcataaaccgcacgccccctatccagaatgacaaactggtaatcctcccctttctcacgggccgtcctcatcagttctactgcttccaaaccactgccggctgtactgggtaccagtcccagtccattcataaattcacatacacatttacatatctccgggtctgcttctaccagaaggcactttaccgaagatatcgctattccctccgattcagaatccatttcaggctccgcccgacagaaatccagctccacagtaaagatacttcccatccccggttcgctctccacacggatacttccgcccatgttagcgacaatcatccctgtaatcgccatccccaggccgctcccctcaatatgatccacccgtgaatcacgctcacgtacaaacgctgtaaaaatattgttctgaaattcccgactcatccccatgccggtgtccgatacggtaaaggtaaaatgcgcctgcccaggatgtggtgataagctttcctcaaccgtaacccggatgctcccgccctccggagtgaattttatcgcattggaaatcagattcatcagaacctggttcatccggacagaatcaagcatcagatgttcatggcggacttcccggatacaaatctggaaatcctggtttttctctttcaccagcggagttatcaccacgacaatattttcaatcagctccgctaaggatgttctttcggcatggatttccatttttccgctttctatttttgccatgtctaaaatatcattgacaagtcctaccagcagttttccggatctgcggatctgacccagacagttcatggttttattcggatcatccagatgatttaccgctatttccgtcatgccgatgatggcattcattggcgtacgaatgtcgtgggacatacttgtaaagaaatttgtttttgcttcatttgcgctttcagccgcctttctcgccttctcctccgcccgaagtatctgcttcgccgcatcagaatagaagataacaaatcctataataatcagggcgcatacaccagccatcaaaaagaatgcatgataagagtactgttccatctttccgctcaccgcttcaacaggaatcatactcacaagaatccagttttcacctgtaatcggagtatgattgatataataatccttcccctcaaactccacggtcatcagattatcctctctgctgccggtctcaagtcccctgcggaattcctctggggaaccgtttttaaaggtcagtttttccaggctgttcagcagattatatccctttaccccttcactattgacagcagaaaacacctccgtcccatcttcgtgtatcacatacagattactctgcccctgaaatgccccaatctgcaggacacggaacagcttatctgtgtcatagcttacaccgatcgctttcatctccttgccattgattttaagctcctcgattggcataaaaaaaatcaaccgattttcatcttcataaatcacattatcaacaatcgctttgttgtgttctgtcagaagacggcccgtcacgtctttataagttaaaagtgaatatgtgtgtgtcctgtcatagtactgggaattttcatcaatcagacagagggtctcaaatccccaatcaggctgttcccgcacagcataatcctggaacttttcaagatctcctcccgacatatccatcaaataccgataaaacatatctaacatcgtccactggctgctgcagtgcttctcaatcgccgccgccatctgcagagatacctcattcaaatactgagaactttccgcatacatggtctgctgcgccatccttgcatagagaaagagcagtcctgcaaccatcatcgcaaggaccacgcccaatatattcctgcttattttccacactctgggttcactcgctcttatttttctcatgtttaccccaatgttcctcattagcttattttactttgttcacatacatagtaattcacttaagtatatcaaataagaatataaatagcaacaaagggagagctttatacagttccttgacaatgtcccgtccattgtcataggattataagatggtccgccaatcaaagcataaaattgcttcataggaaatacctctgatacagctccatccgaaaaaggttcatctgtccgcagcacctataagttctttgatttcctcttttgtcatctatccttccctctcccaagacccttaccagaatctagtcatcatcctgtttaacattgactttgccacatccggctgttcatggcaatccaggatttctgtcagaaggtgcgagacaccctgaccgccattacgcgtcaggttcccagcacaggatgcacaatacgtatagacatgctcatatccttccgctgccacactgcatgccatacctctggccagatccggttcctttcctcctgcacagcctcccaatccacagcactgggtcccctctataatttgggggttctccagaaggaatggtgccagccatgatacccactgctgttctttcctgtccggacatggcaggaacagacctcccttcccctctaccttctgccctattccaagttgtgataatttttcataaatactaaggacctgtatttccagcttatccttcaggaaataataacaattgggacagagcataacgatttcctgtatatctgcagcacgaagtctctcattgagccgcctgataatcttcccttcctgttcttccagtccaagttccgacaccggtttgccgcaacagtcaaacagcacccccatgtctgcctcatccttcagtattttgattaatttcctggtagtcttcggataaaaggacgggaaattgcatcctggaaacagtacacttctgcctgacatatgccgctcattccgaaagatataatttttcttttccgccaacagcattgcatatcctttttcccggcacttcccgttgttctcttctacctcagtccgccgcatgtccaatataataccgcggccatcaatccctatgggacatacctgcgaacacattccacataagaaacagtgatacgcaagctccctcagtttaaccgtatcaccgatatccgccttgtactttgtcagaaaagaacagcgtttctgacagagatggcagtgtatgcatttgtctccatcctttatcctaactttcctgtccattggcctcctccgcccgctccggctgaaccacgtactttctcttgaagtacactcccatgcccatgacgattactgccagtataaccgcaatactgatataaagcaccctgttttccttatccgctaagcctgatgttcctatggtatacatggctgtacccggcagcataaaaatcaatgagaataccgagtaggtggtgaacggaatatccgtaacgccatatgcaaaattctgaagattataggggaacagaggtaccagcctggtaatcatcagcacaaacagttcattcttacctgcttcatcgaaaagccactttttaaggtatctgtttttcataacgaccggtttaatactatccttcaggaaaaagcggcctgccagaaacgctgccatggcacctatcatagtagcaatagaacaacagattgttcccaataccggcccgaaaagcagtcctgccagaacggcaaaggtgacccctggcagagttaacgccacacatcccacaactgtaatcacgatgtacaggaaaattgcattcatcaggttttcttctgccatctgcctgagaagattcaaacttcctgctccactcaacacggccgaccagccaaatatatggttgcaggctaaaacggctgctatcattccaatgaatagaattagttttttatatgtatgaaatactgtcttcatctccatcccccattgacacaaataagcgttgaactttttcaaagcacaacgcttactgttttcctattatctgtccgcctgttttaactttaagatatcattcaggccaataatgaacatgcctgctaccgtaatgatacataatatcagattgattttggagaacggtatccttgtctgatggattccctcccgcaccaatgcggccggtaccaccttcatccgttcactcccatacaagacaagccctatcgctgaacaaacaaccaaattaccggctgtgaagaggctattaaacacgttttcccttttcctgaaaacaaaccacaccgccacggttgaaagaattaacaatcccccaaaaatataacctgtattcacccgcatctgcagccattcattcttaaaacacagaatagccatggtcatagcccataaaaaactattataaacaattttaaatagcttcatcatatcaatcggttactttgccagacggaaaataacggttacccgggtaccatcctccggcagcacatccttatccccgtagaacttggcaatatcattctgggtagttcccgtaggccaggctgcatcgctcacaatacctgttgcacaactgtccagacaaagcacacagcctgtattattttctttggcgctctcaatatttcctccaaaccgcagatccatggtatagtcttctgtgcattgaatgatatcccggaatggaatttcatcctgtccatcccattttacgaagacatcgagcttatccccatccacagatttcccattatccggtcctgctttcatgtctgctgcggttaaattatcaccggctttggctccgatgtcaagcaatgcctgataaaactccttctcgtcagccaggccccgcaaaaccgccttttccccgttggaaccacccttatatacaataccatgtctggtcggttctgtaaaatatgtaccatttacttcacagagcatgaggatttctttcttatctttatcaactgtcatggtttcctctgctgcattctccacagacttactttccacagtattgctctttcctccgcaggctgcaagcgaaaataccattgctgccgctgccatcattgctgctaatttcttcaatttcatcacgaaacctccatggtcgattagatattgtctgcaatatccgcatattaattcgaattctttttcttttgcttttccacatataactgcctgaacaaaacaatgagcgctgacagcgcaaacagcagaagaagcgcagtgacaaacatcttagcgccaccagtcagcatcccgccaacatatgaataaattatagtggctggaagctgtccaataccagtggcaatgaaaaagctgccaaatgacatggatgtcaggccagccgcatagcttacgatatcaaaggaaataaacggcagcagtcttgcaatgagtatgctgagacgtccatgtttttcaaaaaactcatcaatctgcttcaaaccggttctgcttgtaagtttctctactgcatcacgccccaacagccttgcgatatagaagcatactgccgcccctgccatggcgctggaccatgataaaatggctcctttccaccatccaaacagatttgcattcgcaaatgtaagcagaaacgcaggtaacggcgctgctatagactgcagtatcatcagcaggaaggacaccagcgctgcgtaagcaccatacgattcgacaaactgccgtaccacggtaaaatccccgctggcaaacatctttagaatgctattcattgtggtattaacagatggtacaaaaaaacataccagtatacccaacacaatcagagatataacaacatatttccctatcttttttgattttttattttccatattcgaccccctttcccaaatacttaccatatccattctaatcatctgccatgccattgaccaatggttcttttctatacattaatagccaggatagaataaatctatacatgtttatcgttaggggtgactttcttttttcttattgaaccataaaaacaggaattgtctgtgaacataatcacatggcaattcctgttttctaatgtaatatctatcccctataatgcgcccaccaccttgtgtggaatataatgcgcttctaagcgggtaatatcttctttcgtcaatctcacctcaaacgctcccgtggcatcctcaaaatactttgcctttgttccgccgataatcggcgcggtcacgcccttggcaaactgccatgcgagggcaatctgggtcatggtacagttcttttcagccgccagcgccgcaacacagtccacgattttcatatccaccgcttcagttgcattgtatttctgcgccgccattttatcggtcgcactccgtctgctttctgaattccagacaggccgggacaaatggccggccgccagagggctgtagggtgttctggcaatccccatctcattgcagatgggaatcagctcccgctcgtcctcccggtaaagcagattataatggttctgcatggagacaaattttgtccacccgttccgttctgcggcatactgcattttcataaactgatagccgtacatagccgaagcccccagcgcgcggacctttcctgcttttacaagtccgtgcaacgcttccatggtttcttcaattggtgtggtataatcaaagcggtgaatgatatataaatccacatagtcggtaccaaggcgttttaaggagccgtcaatttcccgtctgacagcctctttggaaagatgtccttcgttaaagtatacctttgttccgatgacaaccttatttcttgcaatatttttcttcaatgccctgcccaaatattcctcgctcgttccatgggaataggtgttggcagtatcaaagaagttgatccccaggtccaatgcttttttgacaatttcctctgtctcattgggattcagcgtccattcatgaaaatcctccgacggcctgccaaaactcatacagccaacgcacagcctggatacttcaatcccggacttgcccagtttcgcatactccacttttgttctccccctttattttccatatacttcctttgccattttgaacgccgcccaggcattgggccagcctgcataaaatgctccatgggttaaaatttccgccatttcctccgccgttacaccatgctttttggcgttggcaatatgatacatcagcgaagaatccaaaatccctttcgccatgagtgccgacacagtgacaatgcagcggtcacgggaggacagtttatcctctcccgcccacacctggccaaatagtacatcatcgttaagctccgcaaatttgggtgcaaaccctcccagggcgtctctgcccgctgtctgtttttccatgacaggttcctcctgtaaattttttcccagcagatacggctgctgtggcctgttctcgaataaatccgcgccaagccaggctgccatctccattgcaagatacagatatactgtttattcagtacacctgtattgtaaatcatcattattgatatgtaaaatacctatgttgtatttgatgatatacattttatgtatatcctggaaaattctataaaggaggaaaccgcctgagattgtgagagcgccttcttccatgcgaaaacagaattatttttaacggatggccgagcgggaacaaaacgcgttccctcatacctgcagtcgagtttgatgcagccggccactcccatcccgtttgcaaccataatcgcggcattatacatcaggttataggtagatacaatattcaaatcctcgtatttctttccaatccaatcggccagctcattatccctcatggaacgctcggatatgataagcggcagctcccggatatcttccggcgtaacatattccatggctgcaagaggtgaatcctctctcaccaaaacaccccactcttcactcagcggaatccggacatactcatatttgcgtatatccacatagtcgagaatgacaccaatatccaaaatgcctgattcgatacgttcttttatattggacgaatttccgctgtatatctgaaacgttacgaatggatgttctttcttgaactccttcataatctgtgcaattatctggatgcttctgaactctccgcagccaatcccaatttctcctgacagttccctgttccccctgataaaatcgcgctttgttttttcagaaagcgcaacgatctcctgcgctctgcgcttaaagagcagaccgtcctccgtcaaaacaacactgtggcttgtgcggttaaacagtttcacctgcagttcttcctccagctgcattagctggcgggaaagcgtcggctgcgtaacatgcagaattgccgctgcctttgtaatactttcttcccgtgcaacaatcagataatattccaaaacccgtatgtccataaagccccaccccccaaccatttacaagaagcaatttgggcagactcataacttcttccaaatcctggcctcatcacaaatccgcactgaaggcactgccacacataacaaagaagcaaccagtaccagcactcccgcaatcaggaaccatttctcaaccccataccgttccgcatatatcccggacacaaccagtcccagcggtccgctgagcagccggatactgctggacaatgacagaacccttcccagatactttgcttcaaagttgctttgcagcagcggtgtatacatcccccagtaaaatggtccggagactcccatgagccaggaacataaggtaaagacataaaaaccatccggcggcaaaattcctgatacaaataaactaaaactcattaacaggaaggaaccaacaatggtataaaccctgtttcttgttcctccccattttgacaatatcaacgagccaaacaaaagcccgacagagaacacgacctcaacaatactggcacttgtactgtttccattaaaatatgacattgtcatcaatggaaacagcgcgctggtaggcatcaacgccaaagtataaagacttccaatcagcaccagccccagcatccctttctttgctctgagaatctgaaagccttccttcgcctcccgcaaaacctgtacttttctgtcacgtccctcctgcggcaattccgggatttgcgtgattccaagcgtaattaccgcaatcagcgcccctatgacgtccagggagataattccgctcaggctccaggaactgtacagcactgccgccacaaccgggcttaagatttgtgataccgattccaacgcctgcgaatatcccgcacatctagtcaactggccttccggaacaatctgcggggtaactgcctgcaggcagggattgtggaacgcggaaccgaccgagcgtgccagcaaaaccacaagaatcagttctgtcgataacctgcccatccagcctgcaatcaccattacaaaacttgctgccgagataagaaggtctgagataatcatgattctttttcggttataccggtcgataaagacgccgataaacggtcctaaaaccccctgtgggagaaaccccatcatcatagccgctgtcagtaccatggcagaaccggtatggtctgtcagataccacacaatcgcaaattgaagaacagaacttgaaaactgggatattgcctgtccggtccagattgtgaagaaattctttttccaatttgttattactgtatccatgctgctcccattcctgttcgcggttcaactgtatcattgattattaacttttcatttaagtttaatattgctatctaattttattaacaaggactcctcaccatttgtgtttgcctctaataactctatctttttcttcaattttatattttatgtttccaatgtatgcaatttctcataggaatcattggtcatcaacgtatcccctctcacccaacctattcttggattcattttgaaagctcgtgacaaactactatgtaattcatactttaactcacttgtattgttccaaaatttagccaaacgtccgtcaagtaccttgcttctaaataattctaactttttcctttttagactatccgtatcaacttttcccagtggaatggtactaatatcctttttcacaaaagctaatatgggtattccttgctcgactgcgtaattaaactctttttctgtatagctatctccatcttctgctatagaaccatatctaccagccaccaccaagacatagtaatcactttcatttaatatagttttaatatattcaaattgctccgaatcagctgcaggaaacatttccatacctgccggaaaacaatctaattcaactattgcttacataatggcttttcgttcttctactaaatctgcataagttgaacttataaaaatttgataccttttttccatactcctcctcgtacattagctaacaataatactctagttctcataaagaattaaagtaactgtttccatatttgaaaaacatttttttattaaatttaagaaactcagaatcactttgacaggataaatacttccatttagcataaaatcaagttttctttgaaagagaaactctgccagacatgcgctgacgctgtaaaagattcacaaaaagcattattaagccttttcgaatccattatcgtctctgtccgaaaggatgccaagtttcatcttcttaactcagaaatgataattcgacaattgtttctacatttgttgagtgttcaaaaataatatcgaaaagacatacttctcgcttagcggtaagtcccttctgctattttttaactatttacgtttaaaataccaaaatccgaattaaacaacacctccaccataatacctgccattatattcacactgcgctaaagtcatagaattaaaaaagcaaaaaaccaagctttctgcattaaaaggttcttttaatcttatgtgatatcctgcatctgtagtatgtacatccgctacttctagtgaaatctcctttttttcaagaatctttcccgtctctcgatcaaaagatgccatactgttagatatcaaattactgatgatattttccatatcaaattcaaaacaccataattcgatatccggatcacaatagtagtttaaactcactccatttttttctagaatatcgttccatgtatccataaaatcggttaacatgattccaagattctgtttcttccttaagcgcttatctttttttattgattcgatggtaattctgaaccatgccttaaaatttttcttcaaaatgattgcgcgcatgatgttacccagggcatactcaacatcatgatcgaacttgattgcctcaaaagcagaatccagttcctgacctatattatttgtcaatgtacgaatttcatgcataaacatatttgttactattcccgtagtcgcaagtgtctgcagcatcttaatctcatccctcaattcttgaagctcctgctcttgcttctgttccattgcatcaagtactgctgttacctcggtaggactgatggccagcgtctctttctgctcacactcccggttctgtcctgtcttttcttctgctgctttttcctcctcccatttttttcgttcttctgccagttttcgcatggcttctatctgcttcgccagctcatctttttctttcgcataatctgccagctttctccctatagactgacggtcccgctcaaattctcctattacatgtaacaaaatttgctttaattgaaaaagaccattcccttcctgaattccatttcgatttgcatcatcttctaagtttgtatttcttcgagatatcgcaacatcgccaaatatctgttctgcatttacccgccaagtccctgtcgcatgtcccaagcctgctggagaacggtttttacgtgcggataattccagccagtcaaaatcgctatctccatattctccatagggacgtatacggaacttgtctctatataattttattccgccaaattttttacaaggtttgccctcccaatgatacttttcgtataaaagcgttcctgatcctttgatgtttgtgttatcttatagaaatagagcgtacccgaaaaatcaccaatgcaattttccttcccacaaatttttcttatagaaaaaagttcttctttgatttttcccgaaaaatagtgctgttccgtttcatcaaattcggcttctttaaaaactgtttcttcctctccccgaaagtcaaactcattgcgcaaaatttgtattttcaaatcgtcttctttgatttcaaaatcaattttataatcaaatgaatcaatatttgcactgattactcttgcatcaattagaggcgtctcatcatcaaaaaacaatatttcgaaatcgtccacaacattaggaggaagtaaattttccaaatggttgcgtaaacgcatcatcgttctgccatcccatttatcgtgaagttcctccaggcagaatacagtacctctccctttataatttagcgattttacatatgcagccagttcatcatttttccaataatcaacattcgaatattccaataaatccatatctatgtcataaatcttcgccttaacctgtgaaatttttttattccactcaaagtcattccaattgacaatccactccaatcccccttggttagaaatagtcagcattttgcacttatctgaaagacgatccaacgcaaaccgaccaatccctttagctcctgtctgtattctttttccaggcgtaatgtattcattttttttagaagaattaccaatcgtcatccaatgacttctaatcacatcttcagtcatgccacatccattgtccataatataaatacagttttgatcttttgaataatacagacaaaaattctttgcatctgcatcataggcattttttacaatttccaaaactgctccttccagttttgaaacgttttcacgccctattaatcttgccgtatatgcatctacactaaattcaacatcacgcgctcttcttctcatagttttccctctcagtaaaaattgaaccttctacttaatattatcataaaaactgccgtactggccaccctggatattttattatagatctttacgctttctcctgtctaccttgcaaccgttaatctattataaattttttcagcatacatagttaaaacttccttaccattaaatcttatgccatatcctgcaaaaataacttcctttgaaattataatccttcaactgtctaatggagctaactattgttgaagttacatatttcaccaaaagtcagcataagctgttgttttattatttcgcatgttgccgtttatcgcccccccccagtctagttcccataataatcactctcataatatgctgatggcctattgattcccttttcaacacatcgccgtgtaacgacaaaccttcctgttaagataccgcctgttcaagtaaggctatttctgaaaaccaacaaacaatcaacgactttaaatataaaaaagacactaaaaagggcttccagattatctccatcaaccagttatcgtctcaatctatgttaatcacatccaaaatttctcctccgctctctgtcaaagactaccgcctcctcccaatatgtaacgtaactatctatatgcagaaaaggataaacgtttataataccgtctatcccctgaatttccccttcccatctgtggaaaaaccaataagtggcgctaaaatcgaacgttttttgctcacctttcgcctcatttttcatcaaatccactatattttgtggtttaaacctttattttctatccaatccacaattccgcatcattattaccacctcgacattccctgtccccggaaacatatccaccccacaaactttctccaccctataccctctatcctgcagcaccaccaaatccctgaccaaactggttggtttacaggatatatatacaatccggtccactccgaaatcaatgatttttcccaatgcctttggatgtatcccatccctgggcggatctactacaatcaaatccggcttatcctgaagctcatccatcactttgagcacatccccggccaggaactcgcagttctccagtccgttgagcctggcgtttacctgggctgacctgactgcttcctctacaatctcaacgcctaccacctttttagccacaggcgccagtatctgtgcaatggtcccggtaccgctgtataggtcgaataccaccctgtcttttgtatctcctacgaatccccgtgccgtatcgtacagcacctccgcaccaagggaattggtctgaaagaaggaaaagggcgagatacgaaaacgcagacccagcagttcttcgtaaaagtaatcctgaccataaaggatgtgggtggcatcgctctgtaccacatctgccagggagtcattttctgtgtggaggatgcccgccagcctgccgtccaaaggaaggctcaccagctttttcgtccactctgccagtacctcttcctccgtcctttcacccagataatccctctgtgtgctggttaccaggtctaccagaatttcccctgtctttaccgccctccggaccagcagatggcgaagatacccctgatgctgtaattttttatagaatgcaatccccagctcctcaaaatattcttttgtcgctaccagtattctgcaaaaatccggatgtacaatccgacactccggagtggttacgatatcgtaaaagcttcccctcttgtgcattcccaatgccagcggaccatcctttacctcatccccaaaggagaactccattttgttgcggtatcctgatgagatgggactggccttgattccctggaactcataggtaccgtcctctaccacggtgtccagcagggattttacctgctcctttttaatgtttaactgttcttcatagggaaggctctggtaaatacagccgccgcatatcccaaaatggggacatgcctcctccggtttttctgccggggaatgcgccagtatctccagggttctggcttccgacttcccttttctccgcttggtaatcacacactgaattttctggcctggtatggcattctttaccactactctctcaccatctatatgaaggatccccttattggggaattcgattttttctacagttccttcgtaaatatcgccttttttcataaaatatctccgttctgcccgctgcttaggcattttttatggtcctcttttgccgtatcattatatcatgcaatagggtccgcatcaagccagacccaaaaaggaccgccacttccgcggcggtcccaacaactatcctattctatcatccttctgtatatcttactgtgtatcttatgatggtcttaaggcagcctctgctattcagccttttctgccttcttttcctcaggctcctcatcctcaaagaagtcatcgtcaaaatcatcgtcgaaatcatcttcaaaatcttccagataatcaggagtaaagaaacggtatacagcgtatgcaattcctgccactgctgccactgctccaatgatggccagtacccagagaatgcagttctttttcttttcgtcctcttctctcttgtgaagcagttcattgatcctgctggaattcatcagttcttctacacggcttaatgcctctttgcccatctgatcaaacctgtctctgtcaaatctgttcattctacccacgtcctttcttatatataagcacttctgccctcttgcttgtttttaattattatatcatggaagctcttgatttactatcccaatttattcaaattttatccaattgtttcaatccaattttaattaaaacccagtcccggcagaaatctgctgggcagatgcctgtttcggccagtcagatgcctgtttcagccaggcagacgcccgattcctctgaacaaatgccgcttaccgccaggcatcccagataccagcacacccatcagaccttttttaacttggcaaaggatgcaaacattttcttctggcccgcaccgtcaaataccaccgtgacttcgtaatccttacctccgtccctgatggacttcaccgttccctctccgaatttgatgtgcctgaccctgtctccctcgctgtaatccagggatgctgccttctgcactgtaaatgccttgccaaatcccggatttcccgctgtgctgccggtgccccggcctgacaagggctgggatgatccggatgcatatgcattatatccctttccaaaggtgcttgtacgtgtattccccgctgccggctggttccacggcaggcctgcctcgccggaaataccggtcttgccaaatccgccttcaccggcatcattgttccggctgccatagcttcccagcactggttccagacgctcctcttccagcaactcacccggcacctcctccataaaacggctgggcttgcagtatctggtttcgccgttgaccatccgctgtctggcgctggtaatcaccagctcatttttggcccttgtgatacccacatagcagagacggcgctcctcctccatgtccgtcttgtcatcggaatttatggacatcatactgggaaacagcccatcctccaggcctaccaggtacaccttcgggaactccagtcccttggcgctgtgcagggtcatgagggtgacccggttctcggattcatccatattatctatatcagccaccagggccacctgctccaggaattcatccagagaaggatgctcgctgtcctcctcgtagctcacggccttgttgaccagctcctctatgttctccagcctggtctgggactccacctctccctctgcctccagctcctgctggtagccggtctcgtccatgatgccctctatcaagtcctggatggtataatcatctgactgtgccctggcccggaagctttccatctgtcctataaaggctccgattttttcagcagccttacccaagcccggaatctgcctggcctccctgagagcatcgtacaagctcatgccatgttcagaggcaaagatggtaaccttccccatggtggtggcgccgattccccgcttgggcacattgatgatgcgcagcaccgacaaatcatccactccgttggctatggtctttaagtaggccagaatatccttgatttcctttctctgatagaaattcacgcctcccaccagacggtagggtacgttgtaaaagatacaccgctcttccagaagacgggactgggcattggtgcggtagagcacagcctgctcctgataggcatagccgctgtcccttatctccctggccacaaagtccgcttcctctctggctgtgtcaaactgtttaaaacgaatcaaatccccttcgccgttggcagtccacagggtcttatccttacgcccgcggttgtggcgtataacgccgttggccgcattcagtatgttctgggtggaccggtaattctgctccagtttaatgacctttgccccgggaaacatctcctcaaagctcagaatattccctatatccgcccccctgaaccggtaaatggactggtcgtcatcccccaccacacacaggttcctgtacttggaagccagcaggctgaccagcttgaactgggccaggttggtgtcctggtactcatccaccatgatatacttaaaccgctcctgataataattcaggacctcgctgttattctggaataattccactgtctttacaatgagatcgtcgaaatccagtgcattgttcttcttaagacgcttctgatactccttatatatctccccaatcctgcgctgtctgaagtcctgccctgcatttaacaggaattcctcaggaccgatgagcttgtccttcgcagaggatatggtgcctaacacggaacgctccttgaactgcttggtatccacatccatggccttgaacacctgtttcatcagggttttctgatcatcgctgtcatagatggaaaaattcgtggtataacccagatactctatatgcctgcgcaggatgcgcacacaggtggagtggaaggtgctgacccagatgctctcagccccaaagcctaccagctggtccaccctttccctcatctccccggccgccttgttggtaaatgtgatggccagtatattccacgggttcacctgcttctcctcaatcaggtatgccaccctgtgggtcagcaccctggtctttccggaaccggccccagctaaaataaggagaggcccttccgtttgaaggactgcctccttctgcatgggattcaatgtatcgtaaatactcataaattatgtaccgcctttttaactgcaattatgtttattaagtataccattctgaaccccatcctgcaagacctgcctttcggacgattgcagccgcattacaggcagctgtctctccattgccatatcccctgtttcctgtcttacaggcattcccccataaacccgcatagattttcatttcccccttgtcatctagtattcaatactatataatagatatagcaatgtgataagaatgacagaggtgacacatagatgaagacaaatgaagaacgtctgcaggacctgttttcctatctggggaacctgtcccatgtcaaggcggacgagattcctgatattgatttgtacatggaccaggttaccaccttcatggacagccatttaaaagatatgagacgccatccgggtgataaagtcctgaccaagaccatgattaacaattatgccaagaataatcttctgcctcccccggtgaagaagaagtattccaaggaccacatgctgatgcttgtgttcatatattattttaaaaaccttctgtcctttagtgatattgaagagcttttccgtcctattacatcaaagcatttctcaggccagacatcccaactgtccctggaagatatctacaacgaagtatttactttggaaaagggcgagatgaataatctgaagtctgatgtggcggctaagtttgcccgtgcccaggatacattttcagatgctcctgtggatgacaaggacagggaatatctgaagctgtttgcttttatctgcgagctgtcctttgacgtgtatctgaagacacagatgattgaaatgatcgcggatcagctcagggaggatgcgcctgccccccgcaagaaataggctccataacctgtcagccccgccttggcggacaaaaaatggattgccggggctgccggcatacctatagaaaacaaaacggatatcgcagcaatcctgccgcaatatccgttttttaatacaccctttatcatactcagctttcattatcccctttgtctgcctgcgttccccctgtgagcctggcgaacaccatgtcgtatccgtcacttccataattcagcgaacggtttacccggctgatggtagcggtggatgcgcctgttttctccgcaatctccaggtaggtcttgccttcccgcagcatcttggccacttcatagcgctgggacagggacagcagttcattgatggtgcacacatcctcgaaaaacttataacattcatccggagtctttaaagttaatatggcatcaaatagatggtccactgcttctgttttaattttcttgttcatgtcctggttatctctccttataaatcatacggacttccccttccgcatgtatattgtaaaatgattacaggtcatataagccccatacttgttcattttagcatattaaagtctgaaagtccatacgtgacgggagattttataagggcattttttccggcgctttctccgcactttttccaggtatgttttctgctattttccctgtccctttcaggacagcatgaacttctcaaccacaagtcccacgccgtcgtgattattggatgcggtgatataatcagcggcctgcctcaccgggagaacagcattctccatagccacgcccagaccggcatacttaatcatagtcaggtcattgtaaccgtcgccgcaggctatcatctgctcccggtcaagccccagcacttccagcagacgggccagcgactgggccttatcaattccctttggcatgatttccaggaaatacggctcggaacggtacacgctgaaatcgcggcccatggcagcctttaccttaggctccacagtcaccaggtaatcgccgtcatccagcatcaggaacttgggtactttaaaatccacataggacttcatgtcttccacctgacgcaggggcaggtggttgatgttggactcggcaatggcatagggacattccatattgttagtaataatttcctcaccctcataagtaaggatatctaccctgtgctcctctgccagcccgatgatcttctgattggactccctgggcagcagtgaagaaaacacggtttcacctgtcttgcaatttgtgatcattccgccgttataggacaggatatagctgccgaaacgtgacagctccagctcccttgccaacggctccacgccggccgtgggccgcccggatgccagcaccaccacgtttcccgcttcctgggcattcatcagggcctcttttgtcctgggtgtgatgattttgtcacggttggtcagtgtaccgtccaaatccagtacgataatcttgtagtccatcgccttttctctcctgtatccgattctttatttccgcttatctgcttatgcgtttccatggaaccattttatcagaaatacagcgcagtgacaaccggaacagttattcatccttatcagctaatccttatcagtcttatcccggagaccgaaattcagctccaccaaagccctggggcggccgcccttggcagcgctttccctggcgcagaccgtccccagtccggctgcctgaatcttactgagaatacgcctggcgctcctgaccgtgatgcccagacattccgccagctccgaagcgtcaaacacatagctcttcctcacatccgcaatagcctgaattttcaaaatggattccatactgagtccggttttttcggaaatcgtctgtattttggggtcaaaggatatcatgctgtactgaagctgctgctccaggcccagggggccctgaatcttctcctcctcatcaatctggaagatccctccctcccccttgccaagagaatattccagagctttcctggcatgcatctctgcctggtaagccgtcagtcccatacccagacctgcatttaccaccaaacccaggttctttccctccctctgaagaatcctcagatccttgtggttcttttttcccttcaccaccccggagttggcgtaaatcacgtattcatcacgcccaaaggggaatacagatccctggattccccttacgtagcgtatcagttccacttcaaattcagccttgcttgccatggcactgtaatactggtcctccttctccgggaagttggacatctgtatcaattccaccgcaatctgcgaatactctgcctgggccagagcccagcccttttccagatcggccagggcatccctgacctgggagcgtttgggctccaggtaaaaaaccctgccgcctttttcttctatcatatgatagactgccacataagcagtgaccgccacatcggtcatcttcttctccagcagctccatatgccatgcaacatactcttcctccgccacgcctgcaagcagcgggcaggtatatatattcctgggttgtatgtgaaaggcatccaggatatcctcaataatctgcttctccaccacgtcaatactgaaggtgtcgatttcccgcccttccctgaccattttcagaaatacttccgcaatactgctggcggaccgtctgatgtatgtgtaaggtttctgcatctggtgatgccctagcacatagtcgcagataccgcttccggtaaatatcacgccgtcgcactcctgctcacaggtgtcaatgacatccacggcctcccttaccagctctcttgtatataaacgcacctcatgactctggtcaatctgctgtattgctttcctgatgattacgcaggattcccttggccccactactcccactatcatttatactgtcaacctcccgattctttgcgcacagcgcgccttataccgattataaatcagaagcatcgtataaatcaaccacctgatggtcttttaagagatttagatattcttcctttgtcagtgcgggccggaaatcccttatgatttcctttcctttagcgccctcatcccacagcagatcaatgatggtaagggccatcatcttggctggcacaatgtaggcggtgtacgggtcgtccatccggtaattctccgtgtggagaccgccctttataccgcctgcccagatatgcatacagggcatgatctgggaaatatcccccaggtccgtggagccggctgtctcccagtcctccacaaacgcatcttccccggcatgttcgtaagccatcatgttgtcacggtacaatcgtgcaatctgacggtccgtgttcagaggcagatagccgatacagtcgtgaatctccaccttgccccccaacgccatggctgctgccttcatactccggttcaccttatgggaggcatcctccatggcgtcaatggtaaaggcacggaccatgatttccatggtaacacgctccggcaccacatttaccaggcctccgccctccttgattacaatgcttacccgcaccttgtcctcgtctctgaaggtttccctcagtgcatgaatattgttcatggccagctccgccatgttcagggcattgattccctgttccggggcaaacccggcgtgagccgcctttcccaggaaatgcacggtcttgctgatgaatccattgcccttggtgtccaggatacagcattttcccggctccatctccatcatatggcactgaagaaccatatccgtatcgtccaggccaccgcggtacataagctcctgttttcctcccagatagtggatggttccctgactcatgaggcggtttctgtactcataatccacacattcctctgctggtatggctataaagtcagcggcgccccccaggtgctccatgacgcctgacgtaaggatacctattgctgccccgtacatgtttgccagctgcacattatgcccgcaggcatgaaccattccgccctcagctgcatccgggtgggagtcgcacatgatgcagtccagctctcccatcaccgccaccctgggcccgtttcccttgggaccggaggacacacggcagcctgtataggatacacctgtctccggctccagcccaagcttgcaaaaagcttcctccatcagttttcccgtcctgaactccttaaagcccagctccggcgttttataagcttcctttcccagggcaatgatttcgtcctggtgttcctcaatcacattaaggcatctctgtttcagttcttctttgtccatatcatcattccttgtcatctatacttacagttctgtcatccggctcatgaccctggtggccttccacagttcatccatatccaatgcttcctgcacagtatgtacgtccatcatgccaacgcttaatataaggctgctgcagccgtatccggccaatatattgccgtcgctgccgccgccgataaccatgggcctgggttcgattccctccttctccatggcctgggctgtcatgcggtacaaatcactgtcaagacttacctccagggaaggatatgccagttcatgttccatttcataggcggcccccatctccaggcaggctgccttcaggcattcctccatgtgagccgcttcatccctcagcttatccatgctgtgggaacgtatctcggcggtaaatgtcacctcatcggtcacgatattggtggctgcccctccctcgatccgcccgatattggatgtggtctcctggtcaatccgcccaatatgcatccggctgattgccctggacgctgccacgacagcattgattcccttctcaggctcaatgcccgcatgggccttacggcctctcaccgaacaccttatggcctccatagccggggccttataggcaatgattcctgccgggcctgttgcgtctgctatgaccatgttcttacatggcagtcgggacgggtccatgtgtttggtcccctgcatgcttgtctcctcagagacagtaaacatgatataaaactccttgtggggcctgttggtctccgcaatatcttccacgatttccagtatggaggccacagcccccttatcatctccccccagggtggtggttccgtccgtgcggatgatatggccatccaccaccggtctcacatccttacacggctcaatctggtccagatgagccacaaagcagaagggaggattacatggctcgcccttgacatgggcgataatatttccgccgtttcctccatatgccttcccggcttcatctatggaagcctctattcctctctccttaaaatagtccataagccattggcactgctccttctccccgccggaagggctgtaaatctgaaccaattccaaaaaacgttcctgcatccgctcgcgtgacagcatagtcatcctcctcattatataagccttcatatgcacttagcgcccatgtcccgggcgcttgtgcaaagtattctatccctttttcttgtctatctctttttcttgtctatccctttttcttatctgtctctgcctattattctctgtctatcagtttatgcctttcagtttatgcctttcagtttctgtctgtcagtttctgcctgtcagtccctgcttatcagtcaacctgaagctctttcttgtaaagaagcttgccggcgtagatggagccaaatacagctaccagaataaccacataggatgggttgcccggtatgaagcttaagaagcccagcttcatgagccagttcattccgatggcgatgatggcagccaccacgcccagtttgggacgtgttgcggcaaactgtccgaatacagcgccgaaaagcgcgggaagcaggaaattaagcgcctccttcacaggtgcaggaagaatgttcaggataacgcttcccgcaacagctcccacggtaagaattaccacattgacgagaatggatgtggcaataccgatggtggaaataatggatccttcctctgtacccatctccactccggccgcctcctgggccacggaagaacacggcacacgcatgttggaggtattgcctgaaaggaaggtcaggtaggtacccggaatgcccagaatcgggaaataggaaatgggctcaacaatgtaaaatgctccgcttacgctgatctgcatgagagtgccggcgataatggcggacaccggaggcatatagccccggaaggccatcacaagagcaggaaggaatcctgcgaaaatgcccagcagcagtgtaatctttccccatttcacgattccggggatatatgtaccagaataataatcgtttttcatcttctaaccctccttagattacgctgacagcatatccgatgaacatgccgctgaacatggcaattgcaaatgcccactccctgagccaagcgatatccctggcccttgacagcttcaccagtaccatcatgataacacagccagctatggtagcgattgccggtgcgttggtgaaggtaagggaaccctctgccgtaaagaagttgccggaagccaggttggcaaacgcacccagcatggcgcctgcggaaatgatgggaaccatcttggcattgccctttgacattaagtggttaaccttgtccatcttatcgcagaacaggaaggtaaaaatcagccagcccagggagccgcataccatggtccacacgccgcaggcaaatgccatggtatccatggtctgaagtgtctttcccatggcctgtgcgccgaatccggccgccatggcctcatagttgacagaaccgataaatgacagacgcatccacgccaccggcgcacccatggtaaccagcagggatatcatggtgaccaggattactacggacgggccaatggatgatatcacgctgctcttgattgccttatgtacctggtccgtggtaagggccgactcgctggctgcctttatagaccttttcataaacagaattgactgaaatactaccaccgctactgccaaagccgctgctgcccacatcagagggctgttggcataatccaaataattaacactttcgttcattctgacctccttggttattcccctttccaaaagctgcagtcttttggattttctagtttcggtcatgtccataacatgtccttatatttatatttactacattttatcggtattgtcaagggtttttgttgaatatttgtttgaatgatggaatgggatttggcataggtagtgcagaatatcttaaaggacggggcgggagttggctgcgggcagctatctgcacgggcgggaaggaacagtgtaaaagcgccggtattgttaccgcaaaggaatattgcagtaataataccggcgctttacatcaaccgattcatctgtctaatgcttattctgttttcccttcataccgcttccggtaataatccatggtccggtagtcaatcacatccttcatctgttcagaaaacccgtccatttccaccgcctcatataactgcggattcagagccagtacatagccctctttacgcacaaaaaaaccttttccggactgcagcaaaaagcggaccgggttttttaaggcttctctggtacagcgtttcttatcccatgtacggaagtcacttgtactcttatctttcgctaaatccttccagttatttgccgtataataaaactccttatggccccggtatatatcatcctcatcaatctgagttttgacattgccattgttataaaatgccaaaaggaccggcatcttataggacttggtcatttgcgtggtctccagcatctccagaaaatcattgccaatactattaaatatggcacggtttctgtctcccagctcacccaggctatccaaatacctcagataatgtttaaacggactgttctgcaaaccattacatatctggagtatttcttcctccatataggtaaacaaatccatacgggccggcactctgccgcccagcatctccttaatacggaagtattcactgcggatccgctcttcctttttcgccctcttctttgccatctcatggaataaatcaatcagacgcaggtcgaaatcaaccagacagtcatccggatactcaaaatcctgttgctgcattcttccggcttccgcacttgaataacttcttccgcttaaaaagaacggtgccgagcctgctttttcataattaccgataaaatccagtacattcaggtattccttatccctgcttttacgcagcccccgcccaagctgctggagaaataccaccggggattctgtgggtctcaaaaacataaccatatcaatttcgctgatatctaacccttcattgaacatatccacagaaaaaataacctttaactcaccacgcttaagcttctctatcgcttcacttctctcaacagcatactcgccgtctgaatcgctgtatacagctgccgccggaatattgcgacggcagaattcctttgccatctgctccgcatgtgtgcgtgaacagcaaaatcccaacgccctttttgagcggtatttcatatagtatttataaatcagttcgtactgcctaccctttatgaattcctttgtcagttcttcctcatcgtattttccttttacaatgcgaatcttggaatagtccactgtctcgtccagaattccataataatgaaatggtaccagcatacctttgttgatggcatctttcaggccaatctcataaggtacgttataatcgcatagcgcgtatatatttcttccatccattctttccggtgtggctgtcagccctaacaggaaccggggcttaaaatattccataatttttttatactggtctgtaacagcatgatggaattcgtcaataacaatataatcaaaataatccctggcaaagtatgattcattgagataatctgttttacccaaactggaaacagaagcgaaaatcacggatttatcccttgttttctctttaccataaaaaaagccataatcatcggaatgtctcacattcctgaagctttctgctgcctgcttcagtatttcttcccggtgggccacaaacaggactctttcataaggctgagaatcaaacgcagccagatatgtttttccaatacctgtggcggcgcagatcaatgccttctccgatccttccaatcggctgtttttcagcgcgtacagagcttctatctgtgctcctcttggctgaaataccacttccccgtccgtctcgtcgtcaaggctgtcataccgttccatatcccggataaccgccggtcttttccattctttggaatattgtttcagaacctcatcatttatgacgatggagtggttataaaacagatccgcaaaagtgccgcaaaactgatgaaaattccggctgtcccgcctttcatcaaaatgatagttccattctataccggatgtaagggcgctgcgtgatacattggatgaaccaatgtatatttccccaaaatcctttcttcggaatatgtaggctttagggtgaaacgaccgtcccttttcgttgtaaaaccggaggtccacccggtcccccaaccgttcctttatcagacacaatgcccccggctgtgtaattcccagataatttccggtcaggattctgatttttactccgcgattcagcgcctgctccaaatcatccagaatcatacgcactccggactccatgagaaacgacacaatcatatcaatccgctcagcctttagcatgctgagctccagctggtataacagaaatctttttttatcccttcccccggtaatgacctcacagggcccgatttccatttgaatctgcctcagcgattctattttttcctcaatatcatgttcagccatttttcttctgctctccccggacggacatcactcgttacccacatctccaatatgtcaaacgaatttacatcttttaacagcttatccatcttttcttccgtcatatccgtaaaataacggccattgcgctcaccctcagctgtaccatacttgaaggatgtatacagtattccatgtgatgtcaaagcacgggccattttgataaacacatcctccagttctccataagccagatgcaggatggaagaacatgcccagattccatcataggcttccttttcatctaaatcctgaaaatacatcagcctcacttcaattcctgtatatccagaagctatcctgaccagttcttccgaaccatccgcggcatccgcctcaaatcccctgtccaggaaatacttcgtatctctgccggagccgcacccgaaatccaggattctggctcccggcttcagatacgacaggaaacgctcctgcatctccttaaactccacatcccttgtgctgtcagaaaattcttttgcatgttggttgtaatattgtaatgaatcattcatgaatacaaatgcttcctttcctaaataatccggccgctgtcctctatctacatgactactgtcaatcatatcattttttgacatcacaggcaattaaaactaatttctcagttcccaatgttttattcaccgattccctccagccctaatagactatactataccaaatcatataaggagcatattgatgaaaaaagcaattagcattcttctggcagcagctatgggcgccgctgccctaaccggctgttcaaaatcatccggcagttcatcctccggcaacaccccgctggtcctcaacgaggtagcccattccatcttctacgccccccaatacgcggccattgagctgggctattttgaggatgaaggcatcgacctgaccctggtcaacggcgcgggagccgacaaggtcatgactgccctgatatccggtgacgcccagattggcttcatgggctccgaagccagcatctacgtataccaggaaggttcccaggactatgcggtgaacttcgcccagctgacccagcgcgcaggcaacttcctggtgggacgccagcctgaggacaattttaagtgggaaagcctgaaaggcaagaaggttctcggcggacgcgcaggcggccgacctaagcatgatgtaacatttgagaacatcagggagatttacgagtggacaagccaaaaagccttagatttggcggttttcaagtatgatgaaaagattatatctgcttcatagcattgattgaatatatttagtttgcttaaagaggacaggcccgccctgtcctttttactatcctaaaaggaaggaggcgaaaattgtcgcaaggaaataaccccttaaccgggcctgaccgtaatggttgggccttttttcatgccacgaaaaggaggtaatgcacacatggctgatgaaaagcctaaaactttacaggaacagtcctctcccaccggcccgcctgtcagtcaggaggtcaaggacacggctccggctgtagctcaaccggacaaggaaaaggacaaggcggctgacacaaaagcggttgaagtgaaggaaacagaagccgctggttctaaaaagctggacgatattgtaaagcaagtcaaagaagcccagcagaaacagaccgaggccagccccgccgctcccggcaaaaaacagtccgcttctattactaagatatctgatttgccaaagaccggacaaaagaaagccgagaaaccggagcccacaaaaaagactgccgctcccaaaaaagagacaatggaaaagcccgtacagcccgtaaaatcgggaaaatccaaaagtacagctccggtttccaaaggagctccctgtgccagcgccccggcacaggcggcacccacgcccccggagccgccaaaggaggcaccccgcaggggagaggaacagattgtctatttgaaactgaatgagctccacgccttcaaaaaccaccccttcggtgtgcgtgacgatgaagaaatgcgggccatggtttccagcgtcaaggacaagggcgtgacacagcctgctatcgtccggcccttggagggcggcggctatgagattgtatccggccaccgccgccagaaggccagcgaactggcaggctacacggacatgccctgtatcgtccgcaacctgaccgatgatgaagccatcacgcagatggtggaggataacttaaaccagcgtgaggaaattctccccagtgaaaaggcaaaggccctgaaaatgcagttggaggccatcaaacatcagggaacccggacttcgggccatgttgacccgaaggaggccgggaaacgctccaatgagattgtggcagagcgcaacaagatggcggtcaaacaggttcagcggtttatccggctcaatgagctggttcccgacttaatgaagctggtggacgataagaaaatcggcttcacgacagccgtggagctctcctatatcaataagaagaaccaaaactatatcgctgtctccattgacagccagcaggcttcccccacacaggcacaggccaaacgcatgagggagcttgacgaaaagaaactgctcaatggtgacgtgattgacggaattatgatggaggacaagaaggaggtagacaaagtgattttaacaggtgcagagctggggaaatattttggcgcggaggccaccccgagggaaatgaaagaccagatcatcaaactgctggacgattggaagggacagcagaaggaacaggtcaagccggagaaaaaagctgacaaggagaaataagcagggcttcgggccagtgtgacccgagactaagaccgtggggcgcagccccacgccccgaagctcgaaggatatataattccccgtcgccgtttgttggatagcatagccgggaaaatctgtcaagggcctgccgccgtaggcggtgcttcgcacccttgacagatttctcccggttatgctttaaggcggtcaagcgacggggatataaattcctttgagccgttccccttcccacgggaaggggcggaggggttgggctttatcctgctactgctcttttatagaagaaacggaggtaaaaacagtgaaacgacctttagcttatattactgcggcatggaacggggagccggatattgacaccgcccttgctgtccaatactgccggattacttacgaagcgggattttcacctatctgcccgctcctatatctgccgctgtttatcaatgacgctatccccgaggaacataaggacgggattgacatgcgccgggatatgctccggcgggcccgggtgcttgttgtctgcggcggcgctgtggacgaagatgtgaagaatgatattgccgtggcccagcggctgaacattacggcaaccaccctggacgggattgtgacggtcaaccagcagggccggaacgccaatgatatttgaagcctatctgacgaatgtagccttatatgccatcagaggcgttgaggtcggggaatatttaaaattcccagccaccacggaggaaatacaggcgcttctttcccggatagaaatagacgggaagaaatattcagaaatcttcatcacgaactttgagagtgacgtgctggggctgtacgattaccttgatgaatatgaggatattgacgagctgaaccatctggcgcatgttctggaggaagtacgggataatggcgaactggaaaagtatgaagccgcccttgtcttaggaaaacatacggcaagcgtgaaagatttaatcaatctcgctcaaaatcttaatatttacaattttcagccgggtatagagacttgggaggctttaggctgttattatgcggacgagctcatgacaatccatattccttccgatatacgggcctattttgactatgaggcatacggccgcgatatcgccatcaacgaaggcggctgttttgcgccggctggttatgtgtccgccgctccccttggattcaccgagtattaccacgggacagaggatatccccgcagagcaccgtgtatttgcctatccgaacgagacgccacattccattctggaaaccctgaaacagttaaaagaagccccgcctgccccgaaaaaggaaaagacggggccttcccatgaggaacggtaagacttcgggccagcatggcccgaggccgcaaaggaggtgcaggcaacatcaactactatccaatcaacgagacagcggcccgccgcgccaaagagatgaacagcttttatgattatcaggaagggagcgcaaccacagaataccgcaaccttgtagataaggccgctgctgtggcggaaaaacagaaagcaagggttgaccccatgttccatgaaaaaatcgaccatctgcttgatacctattcccgcaaactggcggaaaacatgaaccagcagtttgcgattgacgcgcgggttccgtccgtcatgatagcggggcctgccaacttccctatcaggaagaaggaaaaccagaaccgggcccgtgacagcaacatggaggaatggcggcatattcagggcctccttgataaaatccgcagtacgggcatgggcggaatcagtgcggacgacccggaagctgtcccgaagctgaaagagaaactggaagggctggaacgctcccaactgattatgaaggaagtaaacgtctattaccgcaaacacggaacgcttgacggctgtgcccttctctcccctgaccagatagaaaagctaaaggcggatatggcccggtgcagttggctgagaaagccctttgaccttacgaacaccagcgcggaaatccgcaggataaaggaacgaatcgaagatttaagcaaacgggccgaaacggaatttttcggctgggagtttgagggcggccatgtggagatgaaccggcaggaaaaccgtctgcaaatcttttttgacgggaaaccggacgccgatacccgcacggagctcaaagggaacggattccggtgggcccccagcgtgggcgcgtggcagcgacagcttaccgataacgcgatctgggccgccgaccgtctggcttgtatccggccgctttccggtgaacgtccttcccagcttcaaaaaaaggcacgggaaaagccgtctatcctgaaaaccatgcaggaatatccaaaggagccgggacaggaaaaaccgcttacgcctaagaaggaggccgaacggtaggcttcgggccatgctggcccgaggttatgaagggagtgattgattatcagtaagaccagacaaaagcggctggcggagcagaaggaagtaaaggaactgctggccgtgctgaaggaaaacaatttttccagcgcaaaggatctcatggccgccatcggccatgtgtcagacttggaggaacagctttccagtgcggttcaggagcttaccgccatgcggcaggaattgcaggaaatgaagcaatcgccgttaaaggccgccctgcaaaggtcggttcagaccttggaggcgaaagtttcccagttgagggtgcagattgacgcgctgaaagaaatcatcatagagggctgtaaacaggcccttgccgattttaagcagcgaggaacggcggccttagacggcgtggcccgcttcttccatctgcgggaaggtctggaaggggtaaaggaaaccattcaggcggggattgccacagacgaaaaggcccttgcgaaaatcgaagccgtttcagccgaataccacgaggcgggcaggcatttgaaatatgtaggccgggccctgatggggaaggaggccgtatcaaaggcaaaaggcccgggcaagctggcaaaaacagttgcggcaccttaccgggctgaacgctccagcctgctctccatgcagaaaagcgtggaaaaagccctcgcccggatagaacggctggaacaggcggcagaaaaaaagccgtccatcttagacaccatgcggacgcagaatgaaaagatacgggcggaaccggcaaaagaggccccgccctccaaatatgccgagcggtagacctcgggccacattggcccgagattttccgtctcccgtaaagataagaggccccccggagtttatgggagcctgacaggaaggaggtattatgcaggacgaagtaaaccaaaaaacggttgccctctcaatccgggcaacaaagctcacaggccgggtgctggcctccgcaatatggaagattttagaggaagggaaaaagcgtcaccagaaagcgctgaccccgcaaggccgccaaagcgtgaaaaagctgatgaaccattacggggccaaaaactccatgcccctcgtgggagcgccccggcagtttgaccgcatagcaaaggaatttcatgtagactatgcgttccataaggtcagccccggccactacctgctgtttttcaaagcgggacaggcggacgccatgacggcggcgttccagaaatacagtgacaaggtgctgaataaggggaaagacaaggcttctatcctcggccagctacggaacctttcagagcatatcaagtcccggccgaaggagcgccagaaaaccagagaggcggtgaaggaagaacggtgagtgacaaaatccgaaaatatgtgcttcccaacctcccctacctctttgtattctggttcttctcaaaggtggggacggcttaccgcatggccgccggagccgatttcggcacgaagctcgtaggcatgatgaaaactttccctacggcctttgaaaactaccttccgggccttggcgggctagaccttctggtggggcttaccggggccgtgggaatgtacctgcttgtgcagtccaaaatcaggaagggaaaaaagttccgccgtgaggaagaatatggctcggcccgctggggtacggcaaaggatatcaagccctttgtagacccggtatttaaaaacaacgtcattctcacaggtacggagttcctgacactgaacacccggcccaaaatcccggccaacgcccggaacctaaacgcctgtgtgatcggctcgtccggctccggaaaaacaagattctggctgaccccgcagctccttcaggcccattcgtcctatgtggtcgtagatccaaaaggcggcaccctcgaacaatgcgggcgtttcctgcaacgacagggctaccggctccgggtgttcaacactatcgactttaccaaatccatgcattacaatccactggcctacatcaagacggaaagtgacgtgctgaaatttgtgaccgccctgattgccaacaccaaaggggacggcaaagacggggacgagttctggacaaaagcggaaacccttctttactgtgcgttgattgcctatatcgtctttgaggggccggaggaagaacggaacatgaatacccttgtggaaatgattaacagcatggaagtccgggaagatgatgagagcttcaaaaatgccgttgactatatgtttgacgggttggaacggaggaaccccaaccactttgccgtgaggcagtataaaaagtataaattagccagcggcaagaccgcaaaaagtatattgattagctgtggagcacgtctcgcgcccttcgatattggggagctccgggaaattatgacctatgacgagctggggcttgatatgctgggagatgaaaaaacagccctgtttttcctgatatccgacacaaataccacctacaacttcctcgttgcccttgccttctccactatgttcaacatgctctgtgagcgggccgacaacaagtacggcgggaggctcccccatcatgtgcgggtgctgtgggacgaggcagccaacacgggacaggtgccgggactggaaaaaatcgtggccgtcattcgttcccgcgaaatcagcctgacgctgttctatcaggccatgagccagtgcaaggcgctctataaggacaacgccgagacaatcatggggaatatggattccatcgtcttcctcggaggccgggaaagctccacaatcaaggaaatttctgaaaattggctgggcaaggccaccatctccatgcagacagaaagccgcacccggggacagtccgaaagctacgggcagaatatgcaacgtctgggccgggagcttctcaccacaagcgaaatcaccaccatgcccggaaatatgtgtatctgccagctccggggcctcccgcctttttacagcccgaagtatgacttgaaaaagcaccccagctataatcagacagccgagtacgacaaaaagaaaaacgccttccgctcggaaaccctgttccgccaccggccattgagactaaaaccggaggacgaatacacggtctacgagatagaggaaacagacgcagaggaagaagctgacattctcaactttgacgacatggacagtgacgactttgcgtgacctcgggccacattggcccgaagcgccgccgttatgggcggctattttgttacccgaaaaccgattcaatctaagaaaatggaggaaaccacatggaatttttcaactctgctatcgacatattaaaggttctcgttatcgccctgggggccgggcttgcggtgtggggagtcatcaacctgttagaaggatacggctcggacaacccggcggcaaaatcacagggaattaaacagctcatggccggaggcggtgttgtcctgattggcacacagcttatccccctcttatccggcctgttctaaagcgttcccatttaaaggagtgatatatggatactatcatcaatgcaatcgtggaatggctcaagggtgtgcttgtagatggtatcatgggaaatctggacggccttttcaacaacgtgaatgagcaggtcggagggattgcctcgcaggttgggacgaccccggcggattttaacgccggggtcttttccatgatacggcagatatcggaaacggtcgttctgccaatcgctgggattatcctcacgttcgtcatgacctatgagctcattcagatgctcatagaccggaacaacctccatgacatagacacatggatgttcttcaagtggatatttaaaaccttcgtggccgtgacgatcctgacgaacaccttcaatatcgtgctggctgtctttgacgtgagccagcatgtgatacaacagtcggcggggcttatccagagcggcacggaaatcacgccggacattatggacagcctgcgcacggacttggaggcgatggagctgggcccgctgttcgggctgttcctccagtcattcctcgtccagttcaccatgaccgccctgaatatcgtgatatttgtcattgtctatggccgcatgattgagatatacctgctgaccagccttgcccctatccccttctccaccgtggcgaaccgggaaaccgggcacatggggcagaactatttccggtcactgtgcgcggtcggctttcaggggctcctgattatggtatgcgtggcaatctacgccgtgctgattcagagtattgcaacggacggcgaccccatgggagccatctggcgctgtgtcggctatacggtgctcctgtgcttttctctctttaagaccgggagcctgtcaaaatccatcttcggcaccggttaaaccggcagaaggacttcgggccaccctggcccgaggcgggaaggaggacatatgccgagacgctacaagctgggggcggacgggcaggcccacccggcctactttggaaagctccccgaggaatttacaaaagaggataccctgcgtttcctcgcagacacggatatccagttatacaggcttctgtcggcggacactcatgccgcactccgggcagaaggctacgagtataaaaacgggggccttatccccatttcagaaaaggagacagttatgcaggaacagacaggcggcgcacccgccgctacacaggaacccatgaagctggacgtgagcgtgaggctcattgaccccgtaaaaaacctgattggctttgccagtgtgaaattcaacgactgttttgtggtggagaatttcaagatactgcaaggcgaaaaagggatttatgcaggtatgcccagccagccggacagaaacgggggctaccgtgacgtagcaaaacccatcacgaaggagttccgcagtcagcttaacgaagcggttgtggaagcctatacgacggagctcgaccatttgcaggcaagattagcagccgcacggggaggccaggaacggccctccatcaaggaacagctcaccgccggggcaaaacaggcggaacaggcgcaggcggagaaacccgcaaaggcaaaggccagccgcgggcaggacagataacttcgggccatggtggcccgaagtgaaggaaggaggcgtatgcccatgacacacataaaacaagcctatgacgccgcctgctactacgatggaaagctgttgggccgctgtaccgtggctgacagtgaagcctattcccttctgatgaaggagtgcggcggcgaggccgtccgtgtcctgcgggaatatccctacctgtccccggagctgaaagccattctggaaaaagcggcgctcatgcaggccgaccgccagaggacaggcggcatgttccatgagccggaaagctccccgtggggcaaggttcagacctgcgacacgctctgccccggggtgttccttgtgagcacggccagccacggcgggacaatggtagcaaaggaagtggccgccgtcctgtctactgcggctaaaaaatgcggtttccagaggaacggttacatctgttttgaggaggacgcacaggaaagcgtggtactgcgggagctcttagataaaaagctgtggaaaatccctgaccgtatcaaggataaggaaaaatttgaggaaaacatcaaccagtccatcagacagtataaccccgactactggcgggcaaggcaggccggacgagaggccgccgtggaagggaaacggcccctgcccgcaaagcagacggccagatagcttcgggccaccatggcccgaagtgccaaaggaggtgaacagcccatggcatatgtacccgtaccaaaagacctaaacaaaatcaagacgaagctggccttaaacttgacgaagcgccagcttatctgtttctcccttgcggcggcggtggggattccgtcctacctgtccagccgtggaaccatcggaaacagcccggcccttttcctgatgattggcctcatgctcccgtttttctttttcgccatgtatgagcgtgacggcctgccacttgaaaaggtgctgaggaatatcctgcgcacccggttcctatatccgagggtgcggccctatcagacagaaaatttttatgctctattgagcggtttcaagaaggaggcgaagccgattgcagaaccagaaaaaaagaaaaagccccgcaggaaaaaagcctgaccggaaaggcggcctgtttcccggcggaaagcggaaggttcccgccaccgcccagcagacccttccctaccgggaaatgtaccgggacggcgtgtgccgggtggccgaccattattacacgaaaaccatagaatacgaggacatcaactaccagctcgcacaggccgaggatcaggccgccatttttgacgggtggagcgcctgcttaaattactttgacagcaccctccccttccagctctcattcatcaaccaccggagccgcccggaaagccgctacagcgtcaacatctccatgcaggaggacgaatataacggggtgcggcaggaatacgtggaaatgctggaaaaccagatagccaaaagcaacaacggaatcgtgcggacgaaactgttgaccttcggcgtgaacgtggacgatttatccacggcccgggcgaggctggaacgggtggaggccgatatcatgaacaattttaagaagctgggcgtaaaatcagccgccctctccgggctggaacgcctggaactgctccacggccagctccacccgggcgggaatgaccccttccgtttttcatgggatatgataccaaaaaccgggctttccacaaaggactttatcgcgcccaccagctttgacttccggttcagccgtctgttccgggtgggcaccacatggggagcctcctcctacttgcagattcttgcctcggagctttccgataaactgctggcggagctgttggagctggacgcggaaatgaccatcaccctccatgtgcagacagtcgatcaggccgccgccgtgaaagctatcaaggccaaagtctccgatatcgacaagatgaaggtggaggaacagaaaaaggcggtgcgctccggctacgacatggacattctgcctcccgaccttgtgacctacagccaggacgctaagacccttctggaagatttgcagagccggaatgaaagaatgttcctcctgaccttccttgtggtcaacatggcgcccacccggcgggagctggacaacgacctgttcaccgtgtcaggaatcgtgcagaaatacaactgcgccctgaaacggctggacttccagcaggagcaggcgttcctttccagccttcccctcggccacaacgccattgagatacagaggggcctgactaccagcagcaccgccattttcgtccccttcataacgcaggagctccgcatggacggggaggcggtctattacggcctgaacgccctttcccacaacgtcatcatggcgaaccggaagaaactgaaaaaccccaacggcctgttccttggcgtacccggttccgggaaatcctttgccgcaaaacgggagcttgtgaacgtgttcctcgccacccgcgaccggattatcgtagtagaccccatgggcgaatattccccgctaatccggcggctgggcggtcaggtgattgagattgcgccggacagcccgcaccacatcaaccccatggacatagatttgagttttgacgaggaaaatcccatggccttaaaggccgactttatcctgtcgctgatggagctcattgttggcggcaaggacggcctacagcccattgaccggacggtgattgaccgctgtgtgcgcttcatgtaccgggagcatatccagcacccggaaaagaaacagatgccgacgttgcaggatttatacgaactgctctgcaaacagccggaggcggaggcttcccgtctggcaacctcccttgaaatctacgtgtccggttccttaaacgtattcaaccatgaaaccaacgtggacttgaaccgccgccttgtgtgcctcgatttaaagaagctgggggcgggactgcgcacgattgccatgctcatcatgcaggatttagtgaactcacaggtttccctgaacttcatgaacgggctttccacatggtgctactttgacgaatttcacgtactgctccgggacgccctgacggccagctactgcgttgccatctggaaaatgctgcggaagaaaggctgcgtcccgtcagctttgacccagaatgtgaaggtgcgcccagatagggcgttgtgcaaagcagtttaaggtactgccgcacacggcagtgtgcgaaacaatctgccttaccgactaaggagaaatcctttacgggaacagcgcatggcagaaaaaggaatagtcaccaaaggacttaggtgcgactgtttcctaatgttaagaagatatgaggataagattgggtttatcgaatgtaaggttccagttcctgttttttgcaggtgtgggaaaagtcctgtaacccatgtcataacgctgtcacgtcatctttcacggcgggacaactgctacacgttatgaaacaggcgtgagaacacgtcataacgaaccgaaagcatatccgacaatcttcattcacctaagcacaacgctaactggggattgcctaagtccggctcattcgccggatatggcaacggaggctccatagtagtccgagaggggtaatgacccttacatggcgaagggagccagttagtaacatctaaaatgtaagaatgaaagggaggagaaacctcaatgaaaccaacatctgaaattttagagcgtattgaaaggtgttccagcgaacacaaagacggcgtattcacaaggctatacagatatttactccgtgaagatatttactacgccgcctatcagaaactttatgcaaacaaaggcgcaacaacacagggtatcgacgacgataccgcagacggtttcagtgacttctatgtaaaagagttaatccagtcactaaaggacggaacctacaaggctaaccctgtaagacgtgggtatattccaaagaaaaacggaaaactccgtccgctgggtatcccgtctttccgtgacaagctcctgcaagaagttgtcagaatgattttggaagctatctatgaacctgtctttgacagtcactcccacggtttcagaccgggcaaaagctgtcataccgcactccgtcagatttcttctgacttcacaggcgtggtttggtttatcgagggtgatattcagggttgttttgataacatcaatcacgaaaaactgattgagattttgagcaggaaaatcaaagacagtcgttttctgaacatcattcgccagtttttgaaagctgggtatatcgagaattggaagtataacgccacttacagcggttctccgcagggtggtatctgttcaccgatacttgcaaatatctatctgaatgagctggacaagaagtttcgggaaatcgcagaacgctttgataaaccgaggtccgcatatcagacaccggaatatcatacggcaagcaaagaattaaaaaggctgtcctactggattgaccataccgataatgaagcggaaagacaagaactgattgaccagcataaagcgcagaagaaagctatgagaaatctgccctgcaaacccgccgacaataagaaatttacttttgtccgctatgcggacgactggctggcaggtgtgtgcggcacaaaagcggaatgtgaagaattaaaaaccgaaatcgctgaatttctaagcacagagttgaaattgaccttgagtgaagaaaagacgctgataacgcacagctccgaaaaagtccgtttcattggctatgatatttgcgtccgcagaaatcaggaggtcaaaggtcacagaatgaaaaacgggacgtggagaaaatcccgtaccctgcacatgaaagttgcccttactattccccatacggaaaagattgagaaatttatgtttgcaaagaaagtcattcgccaaaaggagaatggggagttccagccgatacacagagccggacttctcaaccttgcggattatgagattgtggagcagtacaatgccgaagcaagaggactatgcaactattacaatctggcctgtgactatcacacgctggactacttctgctatctcatggagtatagctgcttaaagacgattgccaacaagcataaaaccagtatccgcaaaatcatccgccagcacaaagacgggaaaacgtggtctgttccttatgaaaccaaagctgggacaaaacgtgtacgccctgttaaaatcgcagattgtaagcgtggcgaagcgagtgacatcatctatcagagaaagaaatttagctggaaaaccactatcagacaacggcttaatgccagagtttgtgaactatgtgggtgtaaagaagccgacttgtacgaggttcacgttatacggaacctaaacgagttggggaattctgattgggaaaccgtgatgaaaaagaagcggcggaaaacacttgttgtttgtagcaagtgccatgaaagaatacacaaacactaatcaatacgtcaattactaatggggagccggatacttcgagaggagtaagtccggttccgagggagggtgtaggaaacctgccgccaacggcggcaagacgcctttaccctaccctacgattttctggcaagcccggaaattgagaatatttttgagaactcggatttcctcgtcctgcttgcacaggcacagggcgaccggcagatcatcgcaaaacagctcggcatcagcccgcaccagctttcctatgtgacccacaccaattccggtgagggccttttgtttttcgggaacgtcacaatccccttcgtagaccacttcccgcagaatacggaactttatgcaatcatgacaacccgcccggaggataagaagaatgagccaaaacaggaatgacaccacttcgggccaacgtggcccgaagctcacggtacggaaaatccccaaagagcaggccatcggttttatccgccgctaccattattccaaaatcatgccccggctgaataagcactatctgggcttttacactggaaaccggcttgcgggcgtggtggcgctgggctggggaacccagccgctccaaagcatacggaagatgttcccccgccacaggctccaatccggcgactatctggaaatcgggaagatgtgctttctccctgaaatgaacgggaaccagtgttttgggagccgggtgctctcccagcttgtaaaatggctgaaaaggaatacggactgcctgttcctctacacgctggcggacggcattatggggaaatgcggctatgtgtatcaggccgcgaacttccggtacatcgggagctttcccaccagcgtctaccgctgtacggccaccggagagaaaatccacccgcggagcgcaaggctcttactggaagaaaacgccgcccttgacggggtagaaagacggttctggctgacccatggctactgtgaatacaaggggattgaaaaaataaacggcctcatgttccgttacctctacccgctgaaccggaaggcggaaagaatcctgaacgcctacccggagtaccgggggctcccaaacccgaaggataaggatttaagatttaccatgcgcaccgccccgggggtatataccccagtcccgccgccggtatttaaccgtgatgtatgccagttcaacacacagaaatgttgaggctggcttttttttgttccgggaaaggaggaatgacctatgggaaagaaatcaaaaaaaggcaggccaaaacagccgccgccggaaaccttcacctcgggccaacatggcccgaagcaggaaaccagccagccgccgaattccgccccttccggccgcctgcgttttgaggaaggggacacgccgccgcaggccggggccacctcgggccagcatggcccgaagtcctccaggaagttccggcaggatacggagcgggcccgcccctccgaccatatgcggcgggaggaaaatgcggacggcggcggagggcaggaaccccatgacaaagaggccgggcctgaccgggccaataagaaacgtactgatggtgagaaacgtgccaataggaagaaacaggctgactgggagaaacgtgctgacggcaaggaacgctctgacggcaggaaaccggacaagacggagaaggcacaggaaaaagcggataaggccggacggaaactggaatcggcccgggagaagctggccgcgcagaaaccgcccaaacagccgggactggcaaagaaagctgtccggggtatgcgggcggaggtatggttttacacccacaacaagatacacgagattgagcatgagaacgtaggcgtggaaggagcccataaatccgagcttgtggcggaggccggaacccgtaagctcgtccggtttgccagacgccgctaccgtgagcacccggcccgccgggtggcgaaatgggaacggaaggagctggcggcacgggccaatctggattttcagaagatggcaaaggatcacccggagcttgccagcaacccgctctcccgcatggcacagaaatggaaactgaaacgccagtatgccagacaggcaagacaggccgcgaagcagggggcgcgggcggcaaagaaaacagccgccacagccggaaccatcacgaaacgggtggttcaggcggcggcccgccaccctgtatttatcctgattatcgtggtgctgttcctgctgttttatatcctgtcggcgttttcctcccttatccccatgctggggagcggccttgcaaacgccatatccggcacctcctacgcctctgctgacagcgacctcttagggacggacgaggactataccgctctggaaaatgacctgaaacagaagattgccaatatcgagcgcactcacagcggctatgacgaataccgctacaacgtggacgaaatcggccacaacccctatgagctggcctcctacctgtcggccaaataccacagctatacccggtcaggaatacagggcgagcttggggaggtctttgaagcacagtacgagctgacgctgaccgaggaggtggaaatccgctaccgcacggaaaccagcacggacgcggacggcaacgagacgagcgaggaagtcccttatgaatactatatcctccatgtgaccttaaaaaaccgcaccctcccagccgtggtgaatacccggcttaccatggagcagaaggagatttattccgtcatgcaggaattaaagggcaacaagccccacctgtgggaaggcatttacacgggagacggcacagggacggaacccggctaccagatacccggggaggccctgtccgacccgtccttcgcggccctgattggggaggcggagaaatacctgggctacccctatgtatggggaggctccagcccgtccacctcctttgactgctccggcttcgtctgctgggtattttccaacagcggcgtccataacctgccccgcaccacggcgcagggcatttacaaccagtgcgcccgtgtctcccccgctgacgcaaagcccggggatatcatcttttttactggcacctatgacagcggcgtgccagtctcccatgtaggcatttatgtaggcaacaatatgatgatccactgtgggaacccaatccaatatgccagtatcagcacgtcctactggacgcagcatttctatgcatttggccgcttatcaggaaattgaccgtcacgaacagaaaggagattcgcatgaacagacttgaaaaaatcgagaaagatttggagaaagcccgggagaaggccgccgagtgccagaccaaagtccgggaactggaaaagcagaaacaggaggaagagaacagccagatcgtgcaggcagtgcgctccatgaagctgacccccgccgagctcctggcctttttaaataacccgaaggacccccctgccgcttcgggccagactggcccgaagtccgctgacggaaaagaaaaggaggacgaagcccatgaagaagcctaaccttcaccgactggcggcgctggccgcctgcctgctgtgcggtacttattttacaatccccgcctacgcccagagcagcgaaccgcaggccgaaaccgcaccggctgaaaccgtggccccggaagaaccagcggagcccaaccccttcaccccggacggaaccggaaccgtggtggataaggccaccgacaaggacgggaaggaattttacaccatcaccaccccggacgagaatatcttctttctggtgattgataaccagaagtccagcgaaaacgtctatttcctgaacgccgtcacggaaacagacctccttccccttgcggaaaaagacagtgaaggtaaggctgtagagccggaaaccacacccgcaccgaaagcggaaccggaaacgcccacggaggaaccggaacagccggagcccgcgcccaaagaggataaggcagacaacggcctgttctccctccttctggttgcggcggtagtcctgattggcggcggggccggatattacttcaaaatctataagcccaaacatcaggccccggacttggaggatgattactgcgagtatgaggaagaagccggggaaccggaggaatccgaagaagatgataccccgccgtgggacgaggaagaactggaagcagacggggaagaaaaggaggacagggaatgaatttcacagacagcccttttgaacagatgatgaaggaggctccccgtccgggcaggggcagctccggcccctgcgccgggtgccgttatgccaaagagtgcaaaaatcagaaaggacgctgccggaaaaagttccgtgccctgcttgtggagccgcaggcttcgggccaacatggcccgaagtcctgatggcccgggagctgacccgtgacgagaggaagaaaatccgggggcttgtcacgggcatgtgcgccagctatgacagcgaaaccggcttgtgcctcccgctggactgcccctgctatatgctgaataaatggcggacaggcgcttactgccgctacttccggcgctccgtcctgcccctcaatccggcattggaaactgccttattggaggaagggcccgcccccgggctccggccctgcacggtctgtggcaggccctttttgccgatggggcggcaagcctactgctccgaagcctgcaaggccgaggggaaccgcaaaaagagccgggaacgtatgcgcaaaatgaggaggaaaacggagggctcctgttacgttttgccctctgggaaaacctgattttgcaggatttctaagaggcagaaccggggccgtgataatctgatacctccgcccccggttttgccgtttatttcgtaacatcaccagacttcgggccatgctggcccgaggccggaaaggagaatctgcatggaagatttaaaagggtatcaaatccagaaggaggccgtctttgagaatggccggggctttgcgctggcccataacccggaggcgcagtccccctccgtaatctggcatttcacggttatgccggaaggggaacgcaattattatggctatacggcctgccgtggtatcctgccgccggaaaaagaatttgagaggttcctgtcctcctacgactatgtttacaaggttccgcaactgccggagggcaaaaggccgatggtaacggattattaccggtattacacccactatccccttgataaaaacaccttcccaaaatcaaaggagctgggactgttggagattgcgccttacgataaccggacgatggtagaaggcaattccatacggacgtggggagaactgatttatacaaagccgctgccggaaaagctggtggctgattatgagctcaaaccctcccgcctgaatcctgacataagaaagaaaatggaggaacagacgcaggcgcttggcaaatgggaggacagccgccatttcggtgacaaacggcggttgacgtggttccacccggattttgggacttatatcctgaaacagcccctttccccggaacagctttccgaacggattgaggccatggaagaattggaggcagagcggaaagaaaaacggtcgagcaccgcccagctccgcaaagaggcgaaacaggaaaaggaaaacagggaaccgtctgcgaaaaagggcggccactcccacgaggacagataggaggacgaaccatgcacgaaaaagacaattatttaaaaaacgcagagctttccacagagcagaactgcaacatgattgacgggattcccaacaacacgccgctccctccggctcccccggaaccggacagaaagccgctggataaagtaaaggagccgccctcccgcaaacggagccgggaacgtgaggacagatgaaaggccgcaggcgcgatatccaccttcatgtgatggtgacggcggaggaactggcaagaatccgggaacgcatggacgaggccggtatcaccaacgccggggcctatgtgcgcaagatggcattaaacggctatatcctccatgttgatctctctcccgtaaaagagctggtttcccttcagcggcggtgtgccaacaatctcaatcaggtggccgtccacgccaacatgtacggcgtatacccggaggaaatcgcagggctccagcgtgattatgaaacgctgtgggggcaggtttccgatgtactcaaagagctttccgagctggtggcaaagtaacagacggggcggcggccatggacagttatggcctgccgccctgtctttttttgagcttcgggccaccatggcccgaagtcccaaacagccgccaaaaggcaaccttgatttattggcggtaaaaaaatataatagtggtgttggcgaggaaagggggtatgtatgccaaagaagcggcgagggcgtccggccacagacaacccaaaaaacctccgggtagatgtacgtctgaccccggaggaattagagctgttggacggatactgccaggaacggggcgtgtcacgcccacagggcctgcgggatggaatcaaagcccttcatgcagacaaaaaataaggaaagcggtgcccgttggcgaacgtattacaccgctttccccacagccacctgcgaggcggccgcataaatattatacactgtgcggctgtgtcctgcaaggcgttgtgaaaaacaatacggaaaggacaaaacggcatggaacgaattttagaagcacttgcaaacgatgacctctctactatggcaagcaccataaaggagaacccggaatacggggaaagcatgaaagaaatctgcgaaattgaaaatatcctgtatgcggcgctcaatcccacggaaagcagcctgttaaaaaagctggaagatctgcaactggacgtggccgaattatcagctaccgcccgtttcattgacggctaccggctgggtgtcctgatgatggcggaggtatttgccgtaccttacggttcagaagaataggggggatttctatgtatcgtatcatagaacaactgtatgacgcacccattggcatgaacagcatacagccgggacagaatcccgaacttatgaaaatggcccgcaaccgggaagaaaagcggcaaaaactgattgccacactctccccggagcagaaaaaactatttgatgaactcgtccaggcagatgaagaaatagaaagttcaagggcctttgacaagttcaaatatggctttcatcttggtgtcctgatgatgatggagatcatggaaagctacgaggatatgctggcctgacacttctttccccagcggcttcgggccagtgtggcccgaagtcccgggacaggattcgctaatcattcgcaacattcctgtcccagagccgccatggtaaaatataagtagaaagaataaaaggaggcgttataaatgagattactgctaaagctgtttgccgctcccgtcatgctggtgctgacaatccttgcggccatgttgatgttcctgtttgatatctgttcatttctcctgacagtggcttctgtcataacggcgcttttgggtatcgggcttttctttacgcccaccccacacggcgggttcatcttcctgtttctggctttcctgctttccccctatggattgcaggcggttgccgggcttctgattgaggcggtggacgggctgggcagttccctccgccagttcctcgtaagctgatactgcttcgggccacactggcccgaggccaatgacggcggctcgcaagggccgctgttctgtttgggaaggagggattcatctggctaccaccactcttttgaagcgtcacgccaatgagggagaaaccatagccgaggcagtccgtgactgtctcgactatgggaaaaatcctgaaaagacggagaacggaaaatacgtttcctcatacgagtgtgacccggccacggtggccgccgagttccttttggcaaaggccagctataaggctatcacaggccgggagcagaaaaaggaggacgatatcctgtgctatcagatacgccagtccttcctccccggggaggttacgccaaaggaggcgaaccgtatcgggtatgagctggctatgcgctggacaaaaggccgccatgcctttatcgtcaccacccatacggacaagaaacacattcactgtcacatttattacaattcaacgaccctcgactgcacccggaaattccgtaatttctggggctcgtcctttgccctgcgcaggctctccgaccggctgtgtctggaaaatggattatccattgtggagaatccgaagccccggagcaaaggggattataaaaactatggcgaatggctccaaaacagggagaggccgcttaactttcaggataaactgcggctggcaatcgacacggcactggcaaagcgccccggcaatctggcggccttcctctccctcatggaacaggctggttatgaaatcaagaaggtcagaggcggcggcctgtctttccggctggccggacaggggcaggaacggtttacccgtctgcgggcctccacgctgggggaagggtatgacttaaaagacatactggctgtcatagacgggagccgaaaacgctccggccaaagcccccgcaaggtcaatctgctggtggatattcaggcaaagctggccgaggggaaagggccgggatatgagcgctgggctaaagtattcaacttaaaacagatggccgccgcactcgcctatttgcaggataacggcctgacggaatacggggaattggagaaaaaggccgccgagacaacagactgtttccacgtcctctctgaccagataaagcggacagagaacgccatgaataccaaccgggaactgaaagcggccacggtacagtatgcccgcacacggcctgtctttgagaaatacaaagcggcaaaatacagccggaaattccttgcggagcatgaggcggacattgagctttaccgggcggcacaggctgacttgaagcgtctgcttgacggggcgaagctcccgaagatggacgtactaaaagaagaaggacggaggctggcggagcagaaacggaagctctatgcggagtatcagagaatacggcgggatatgcaggaagtcaacacggcgaaagcaaacattgattatctgctgggctatgccgggcaggataaaaagaaagaacaggagcgatagagacggtgaaaataaggagcaaagcgacgcagccacttcgggccagtatggcccgaagttccgggtttggggcgggccccaacaagcctcctccgtgccatctgtggccacggaggaattgcttgccatttagtgacaccccgaaaaatgacacaaaaaaacagaggctcttactcctgaacctccgtttcccttgcttttttcagcccttcggctgtggcctccatgacaacaagctccttctcattcatcgcattgagcataacatcaatgtgcttacggcaactttccccgctccgctgattttccttgtagaaaaactggtctacggaaatatcaaacatggtaacgagcttgaagaacagattaaaactggggtgttgccccttgttctcaatattcataattgtgcggtcagtttttccaactaattccgcaacataggcttgcgtccagccccgttcctcacgggcctttttgagagccagccctaagccatgaaagtcaaactttctctcgtcttggtacataatttatcaccctatgtcattgtacatttcaggtgatagtattggaatgtaatagaattttatgcagagtagtattttatttcatattattataatgttgccatgaaaaagatgttcatatataatgtatgtggtttaatgtaataaagtttaacacaatatacataaggagttgcctatgcaaaacatattacttattgaagatgaagaaaatctcaatcgtggaattagcctaaaattaaaaaaagaaggctatacggttttctctgcctccactgtaaccgaaggtttatatatatttcacaataataaaattgatcttgtcatttgcgatattggcttacctgacggaactggcctagacgtctgcaacactctccgcaaaaaaagtgatgtactttttctattcctaaccgccttagatacagaggtggatatgataaccggctacgaaatgggggctgatgattatataacaaaaccattcagtatgagtgtgcttatctcaaaaatcaacgccatattaaaacgtaacgctaggtcacttgatacggtaattcattcaggagaactcaccttctttttagacgaaaagcgtgttacaaaaggtgatactcccctctccatcacaccaacggattggaagttattgacggtctttattgaaaatccacgacgtattctttcccgcaaccaactacttgaacacttatgggatattaattcagactatgtagatgaaaatgctgttgctgttaatatccggcggcttagggaaaaaatcgaaacagacccctccaatcctgtttatattaaaaatgtgcgcggattaggatatgtctgggaaatggagtgtgacaccaaatgatagtcaaaaaagaggtttcacttttgttcaagctaattctgattttcttgtttgttatttttgccgctgaaattattgtactgcccaaaatagaacatgatatgttaaaagaggcaggcaggcaagaactggtaacagtacaacaaatctgtggggctgtgcttgaaaacaacccagagcttgaacaaaattttattttggggcttcgcaagccaacaaaacattggcaagaaaccggagaaaaaattttgaatcaatatggctatgacgagaatcatttactatcggataacacactttacgcctcttacctgattgcatggaaaaactggacagccttttttctgattaccgcaatcctgtttctgtttgccttgcttttatatatttatattaatatccgcggttataacctgaaattatcgcagatattagaacagtatttatcagaagatttctcttttgcatttagtacggaaccgattcgcaaaggtcgaattgattttatgataaatcaggtaggcgaccgcctaaaacagttaggacaccaaattaaaacaaaaaatacgaaaatcattcaagaaaaagaaagcacaaaagcacttgtcacagatatatctcaccaactaaaaacaccgatggcggcgttaaaaacatgtttttatatgtatcttgatgctgggaacactgatgagaaagccgaatttttacaaagaagccagacacaattagtaaagctggagcagttgatttccagcttgatgaacatatcacgtttggagactgccatgatctccctgtccgtacagcctgtatttctaaatgatttacttgtaactgcggttaatggaatttatgaaaaagccagaaagaaaaatattgaaattgccttgcaagaaattgaaaatatctccttacaattagatgagcattggacgagcgaagcgattatcaatgtcttagacaatgcagtgaaatacagccccgaatacagccatattaacatttccgtgcagaaacaacatttttatacccgcattgaaattacagacgagggtatcggtatacaagaaagcgagtataataaaatttttctgcgcttttatcgttccaacgagccagccataaaaaagatagaaggaagtggtgtcggtctgtatttgacccgtatgattctggaacgtcagggaggaacaatcagtgttaaatcagctccgggaaaaggcagcacctttattctgcaatttaaaaattgattgataaaaggccggagaatccggtcttttgttatacataagtaagctgtgctatcttcgggacaggttggcccgaagtatcccttctgttatacaacggtaagctatcctgtaaggttcctgtaagtattctttgataaagtaaattagggaagggtacgaaggaggtgaaacatggatacaacgttaattactaactattttgaactctatggtggtttggcaatctttgttattgtcctgttggaatatttgaatcttcctggatttccagccgggattatcatgccgctggctggtgtctatgccgcaaaaggaggacttagcctcttgtcagcaattactatttctgttgccgccggagaacttggaagctggatattatattttttaggcgcatatggtggaaatgccttcttaaaaaggtatctgaataaattcccgaagcatgaacctgccataaaccgcacatttgagttaatccggcgcaaaggttattatggtatttttttcagcaaactgattccgatgatcaggactgtaatttctatcccagccggaattatgaagatggattttacaaggtattctattgcttcgtttttcggcgtaactgtttggaatacggtgtttgtcggagccgggtacataattggagaacctatattgaatttaattgcggggaggtgagggaatgaggattgctatgatgacaaataattataaaccgtttgtcggtggagtacctatctctattgagcgtcttgcagatagtttacgggctttaggaaatactgtttatatttttgctccagattataaatccaatgttccagatgatgaatatacgtttcggtttccgacaacacaaaaaagaattgcaggtgcggttcctgttcccagtcttatgtaccatcatgttaagggaatcatttcaacactggctattgatttaattcatgttcatcaccctgttatgattggaaatgtagcaactcgtctgggaaaggaattacatattccggtcgtgtttacttatcacacaagatatgagcaatatctgcattatttaaaacctctgggatatttgcaaaataaggctaatgagggctctgtctttggaaaattaattatcggctttgtccaggagcaaattgtacaacgctatctcaattattttattaagaaatgcgatatggtttttgcgccaacagaatctattcaaaagcgcctaaaacagtatgacttttatacgcccgtaaatatcgcaccaacgggcttgccagaaaatagttttgaagcccactctggggctacagagattcgacagcgctatttacaaggcaaaaagtatcttttctgcactgtttccagattggcaaaagaaaaaaatctttccttcatgcttcaaggtattgcaaaagcaaaaaaacagtcaggagatattttcaatgtaattgtcataggtgatggacaggataagaactatttactaaaccagtctgccaacttgggaattgataaaaacgtattttttattggtgaaatacccaatcagatgattccagactatcatcaggcttgtgatttgtttctattttcttcaaaatctgaaacacaggggattgtactattagaagccatggccgcttatctgcctgttatcgcaataaacgcaaccggtgttgctgatgttgtggaaaatggacaaaatggaatactctccactgattcgacagaagaatgggcgaaaaacttagtctttattatgaaaaaccggaatgttcttacaggaatgagaataggagccagaagaacagcccagcgttacagtgagaaaataattgcggctcgtattttaagtcattatcaatatctacaaaaaaactatcaggcagaacaatggctttattatcatttaggcagaaactatcaaaccatattattaaaggagaattattaagatggatattattcttgaaacaaaagaccttataaaaacatatgtcactggaatcaatacttttaatgcggtgaatcatacttcaatccgcattgaacggggagactttgttacgattgtaggtaaatccggttccggcaaaagtacactgcttcatttaattggaggtttagattctcccacttcaggagaaatctggattgacaatgaatgtatcacaaaaatgtctgaagaagatttatctgcattccgcaggcgaaaaattggttttatctttcaggcgtttaatctggttccctcgttaaatgtttgggagaatataatcctgcctatcggtcttgatgataagaagccagatatgccctatctgaaagagattatcgaaatgctgggactgactgataaactcaccaatcttcctaatacattatcaggaggacagcaacaacgtgttgctattgcaagagcgcttgcaacaaaacccgctatcattttagcagacgagccgacaggaaacctcgattctaaaaccagtgatgaagtaatgacacttttaaaaacctctgctttcaaatatgagcagacacttattgtaatcacgcataatgaagatattgcacagatgggaaaacgtaacctgataattacagatggcaaggtggtggaagaatgaaaacagtttatcatttagcattcagccgtttaaagtacaataagggacgatcttttctcactgctattgctattgctttaatgacaacgctcctaatggctatcggcagttctgcttttacctttatccgctatcagcagatagaaaccgaacaaaatgctgggaattaccatgtcattttgaaaggagttacaccagaacagatttttaaattggaaaatcatactgatgtagaatctgttttgacaagggaaagtattgcctccatagaaatttcaaaacttagcgcatttttaaattatgaggtattaagaaaaggaagtattaaacaaacagaattaaaagaaggtaatatgccatcagaggcaaacgaaattgccgggcctcctgctctgtttgagcgattgggagtagcaccgcaaattgggcaagagatacagctacccttacggattcaagggggcgctatacaaaattttgaatttgtgattagtggaatcttggaacagcaagatatatctaatctcaatgtaaatgaaacacggcttgtctacggcgcatatatttcagaaaaattcgttgaacagaatgttatgccggaaaaacgtgtctataatgcttatctccgcattatgaatgaaaaagagtatgccaaagatgaaatcgaggaaatgtgtatagaaatagctgaggatgtagggttgagtaaagcggacgtttcctacaacgaccaataccttacttatatgactaatcccagtatagaagcgcagaaggtaatggttggatttggacttttggtgattatccttggcggcatggtaatttacagtatttattatgtttccgtcatatctaacattcaggagatgggcaagttaaaagcacttggagcaacaaagaagcaaatacggcggctactttcaacagaaagcatgacactttctattattggtattccgttagggattctgttaggctacctcataacagcggccatgtttacgttgattatatttacaggcgaaagtgaggtcgatacattttggtatcctgctgtagttcttgcagtcatagccgccgttctgctcacgatattagtttctatccgaaaaccaatgaaaatggcgtcggcaatatcaccagttgaagccatgcgatatcaagagccgcaggggaagaaaaagcagaaaaaatcttttaaaactctctctatctcaaaattaagttatgcaaatttacagagaaacaaacgcagaaccatagtgacgctattggcacttggtttctctggaattttatttatggtgactgccaatgtcgcaaacaatctgaaagcagaaaactatgcaagaatgcttatgccaaaaggtgactttgaaataagccttaattatgcgttgaacgatcaggaatacccggaaaataatctgaatttcctccaacaacaaaatttttttggagatagcttaaaaaatctaataatgtctattaatggggtggaacgtatagaagaaaaccatactgtattagcagaaccggaaaatgtaaaattagaagaacagcgggttgagttgaagggaatctctgaaggtgatttagattctttgaaaggcacattaaaacgtggttctctggactataaccaacttatacaatctaacggaattattttcacttgggatattttatttgaagaatatggatttcatattggggatacgatagaattaacactctatgatggtaataggaaaatcccttttactggtactttattagccagtacaaacagtagtgaagaaacgttcttaattgctgatgacatactggaaagcctgattactgatgtaaatcctacaacagcattatacattactgttcgtccagaaaaatttgatagcataaaaacacaactgaactcactgcaacagaataattcccatttttcattcaaagcatatgatgaagaaatgggtatagctgaacatgtaattcgttctatccagtttactatctatggactattggctgtgattggtattattggatatatcagccttgttaatactatgatcacaagcattttggtccgaaaaaaagaattgggaattttacaggctattggcttatcagacaaacagctccggcaaatgatacaccgagaaggaatgtttttcacatttggtacactattattagctcttgtatgtggcaacggattaggttacatattggtacgctttataaaaaacacgaaaatattgatgataaacaaatatgagtacccatttattccaacggttcttttaattgttgcaatctttctgggacagatagctattacattttttacgaaccgatatatccacaaacaatcattagttgaaagaatgcgagattaaaacgaaaaactgattatcattccatctgcccggcggcagaaaagaaaaaaaccgtcgctgggtagcacttttccatacctatattgtatatcgcaacggcggttttgatttttcaaagccgccgtttctttatgcctcaatggggaggaatgacgactaattctggcaataatggcggcttatggaggtagccgccatgacacaaaataagcgccgacaaattacgacagaaatcttcctgttaaaaaaagtccgtatcctacgcagggacagtctggtagcttatatgaaattctttatgccataaccgataatgcaatttcatgcgcctgtatagctttttgctgtgcaggcgtttttgcgttcttatggacaaacctcgggccaacatggcccgaagcacagccccggtgccgatctccaccgcctctatttcggttgctcattcacccaacaccgaaatggaggaaattatgactactataaatctccgggactattacccgttttatacccacgactatttcattgacgtacctgacgaagtggtggaactgttcaaagaatttgaccgaaaagaggcggcctatcgtctgcgtacataccgccataaagcctactactctcttgaccggaatgacggcattgagcatgaggcgctttttgtttccctctctccccatgaactgtatgagcgcaagatttccatgcaggagcttcatgccgccatatccagtctgccggacaaacaggcgaaacgtgtctatgcccatttcattcttggcatgagccagacagatattgccaaagccgaaggtgtcagcaaaatggcggtaagctattccattgaacgcgctttaaagtccatggaaaaatatttaaaaaattctttggattgactttacagagaagcgatttttgaaatggtttatgagaggcaaacagactcgggccaacgtggcccgaagaaaaatacgccttgactgcaatttgaaagctgaataaaaagatacccggatacgaagggttgatgtgtccagtgacaggcccgccatgacctccattgtcagagaatggggagagcgaaaaggctcatgccgcaggcaggccgtggctggtctgccggataaaacacaaagaccttgttacttgcgtttagtcaccgtccgagcgtgaagcggccttgcaagccgtgagccgtcgcaggccatgagaacgccttgccatcagaatggggagagttgagatactatggggtggacatgcctacacccgtccgggaatctgataagtaacatcatatcatggggagccacccggccttactgtcttgtgacaggccaaatcttccggtgcggcttccctgtttttcaagaaggagtttttcaatgggtagaacatttgaggaaattcaggctatggcggcagacccatggagtaatgacgcctgccgtggctacgtcatttgggccatggagaactgcggatttaagccgccagaaataaaacaggttgtagccgagttatacaccgtatttgactttaagaccattgaagaagcggccagtcattattatgaaagttctttttaacttcgggacaacctgacccggagttttaattttgcccattttaaatttcatctataggataagcctcaaaccgcatatgatgtagcaagcatacatagaggtgattgttataaaaagaggaaaagaaatctgttacttacttcaaaaagctgacactgacagtaatgaaattgctgaaaaaaaagaacatctgataaagcaggggtatcttgttgtcaccattatcgagggtgcggaacacatggagaaaggtttgcgggaggttgtgaagaaccatttccactaatcattcgcaacattgtgttattccccctatatagtacaatataggtataacgataaggaggacgatattatgatttcaaaattaacagatacccctgaaattatagatggctatgttcggctttccagagacgataataagcggaactactcgtctattgaaaaccaaaaaaagattatccaacaatatgcagaagaaaataacatgataatccgccacatttatgaagatgacggaatttccggttattcattcaaccggcccgattttcaaaaaatgatggctagtcttgataccattaacatcattgttgctaaagacttatcccgaattggcagacacaatgcaaaggtactactctttcttgaagaaatggaggaaatgggaaaacgtgttatcctgattgacgataactacgattctttttactctgatgatgatataatcggtatcaaaacatgggataatgaacgtcatgtaaaaaatacaagccggaaggtaaagcgaatcaagcgcatggagcaggaaagcggaacgcttgtcagccagacaccatttggctataccagacaccctctcaataaacagatgattttgattgatgaagaagccgccgctattcttaatctggaaaaggaaatttatctggacggcaacggaatacgaaaaacggctgaaatactttcagaacgtggtgttcccactcccagtatgatagataaagaacgtcatgaatcgttagggcttgtttataataagcaggtagcctatcagtggagttacggaatggtaaaggacacattattcaacgactataacaatggtgtccttagaacacacaaacgggaacgtgttacaataaacggtaaagataaaaaagttcctaaagaaaatcaatatatttttccgaatcatcaccccaaaatttttgatgatgataccatgaagctgttaaatgaagtcaaggacagccgccatcatagcaaatatagaggacagagagcccatgtaaaccttttttccggctgtctgtactgtaaagactgtggctggaaactaacggcaattaaccgccctaaccgtgggaaatattacgtgtgcggcacttacaataaaaagggaaagcagttttgtcaacatgcccaccttgtgacagaagaaaccctgatggacgctcttgttaaatatctggttctctgccgcgacagtcttgcagatattatccagaattttgacttgtcaaagctaaaggtagaaaccttcactcccactgacagcaaacagcgtttagaggccgaacttgaaaaagtcaaagaagaactaaaggttctcataacgcaaaaggtaagggagattaccgccaatccttccatgaatgagattatcactgaaacttatacggcccttcaaagtgataaaatggagcgtatttccgctattgaaaaaacgttgcaggatttaacaaaggagcctcatatcccctccaccacaatcaagcccagcttacagacggcgctggacattctgaacgaggttcttgaaaagaaagaactaagcagaaaagatattgaggttctggttgagaaaatcatagtggataaggacggcaacgtagatatttacctgaaacacggccttggcaaccttgccgcctatgatttcagggcagacaaagaaaacctgaaactgactatgctgattgaatctatccggcttctggaaaaggacgaaacaggctttacctcggtaaaattccttgccgacagcctgaaagagatgggctatcccatgcacaaaaagaagtttgtgacttacatggagcacttacttgacttagggctggttgagaaaacaggaatctaccattatccctatagaatcgtggcttctcgacagcaactgcgtgatgtggaaaaaatgttcatcgtggtagggcagactggcggcatgcctcagatggtctttgagtatatcttaaagaaacacggtatggaccccaaaacagacctttctattgaccagagcattaacttcgggctgaccgcagctgcatttaccagcgatgatgcggactataccgtggaatttgagccttttgcaaccactctggagagcgagggaagcggatatgtggtggcttctcttggaacagaatccggatatgtaccttacactgcttactgtgccaggaagagttacgtggaacagaacccggaaatcattcagaagtttaccaatgcaattcaaaaaggcatggactacgtaaactcccattcagccgaagaaatagccaaaaccatacagccccagtttaaagaaacaccggtggataaactcgcggttatcgtaggccgttataaggaccaggatacatggaaggatgacaccgtatttgaaaaagaaagctttgagcttctggaaaacattctggaagaggcaggcgaactgtcggcacgtgttccctatgaagaccttgtgaccacacaattttctgaacaggcggcaaaatagacggtaatacagccagcaatacagatagctgaacagatagtagaacagacagcaaaacagacagcagaacagacagcagaacaaacagtagaacaaacagcaggccaaacagcaggccaaacaaataaaagcaatcaatcgacaatacggcagacaacaagcccgacaacaaaaccagctaacaaagttatgccctttagctggttttgttgtcattttccttgctgtcttttatttttcgctgctttttaccttttctgtcattgatttagtttatatctgttttctgcttctttactcaccatgttttgccagcaaaagcgctccacgccaatcaaccattacgctgcccaaaatacaagcttcttatccatccccatatccccaatccgttactccacagagcctcatatattttgccgaaggtcatagaatgcgatggaatatatagaagttgataggggcacatagaaacagttaacaaaaacatttgcggcattttaatccccgttaaaaaggctgccatccatcaggatgacagcgaaattaataccccttatttcattaccctgaatatcagcccctgcaaataatcctctgcacataaagctattagctactgccggttcagcttccaggcccccacaagtttcttcagataatccatataacctgcctcccgtatgctcccgttggtcagcacattaacctctcccagttttttgcctcccagggagtactccagcacacctgccttctgccccggttccaccggagcgggtacggattccaaaagcaccagctttttctcaatagctcccaaatcctcccctttaaggctcagataggaaaatgttccctcataggtaagccctacctcatcctccacgccgccggtaaccggcatctggggaagcggcagatgttccttgtcttcatagagtttgcagtttgcatatccatagttgagaagggtctgagcgtctgcaaacctggccttgaaatccggcgcagccatgatggcagcaatcaggcgcaccccgtccttttccgctgtggcagacaggcagtatttcgcaatggaggtagaacctgtcttaaggcctgtgaccgtaaaattagttgccatcttaagcagcttatttgtattggacaggccgaattccttggttccctgctttgtgacatgcgttatattctccatccatatagtggagtaattatgtatctggggatatttattaatcagctcgcggctcataatggcgatgtccctggccgtagtgtaatggtccggggattccgtaaggccgcagcaatccacgaaatgggtgttggccatgccaaggccggctgccctttcattcatcatacgcacaaattcatcctcgctgcctgctatgtactccgccatggccacagacgcgtcattgccggatgcaattacaatgcatttaatcaaggtctccacggtctgtttctcgccttcctccaggaacacctgggaacctcccatggatttggcgtgggcgctggtaactacctcgtccgtcagctggatctttctggactgaagggcatcaaaaatcaatatcagcgtcataaccttggtaacactggccgggcttcgcttttcatctgcatccttttcatagattacctgtccggtagatgcttccatgagaatggccgatggagcggctatctggacagctgcctgactctggtccgcaggcgctgcctgggcatctcccgccgtctgcacatctcctgcggcccgcgcgtcccccgccgtctgcacatctaccgcctgcgcgtttcccaacgcccgaacatctcctgcggcccgcgcgtctcccgccgtctgcacatctaccgcctgcgcgtcccccgacgcccgaacatctaccgcggcccgcgcatctcccgccgtctgcacatctaccgtctgcgcactttccgccgcctgtacatcctcccctgtccatccatcttcctgtccatagaggctgctccctgatacccccgctcccacggggatggcgattgccggttcctggcccagggcggcaatcccgggataggaggccagtattgccgccgagcataatatcgctgcaatccgtctcatattttcctccaataaaatcatctgctactaattgtatgggagtggacagacagcttatgcccgtaaagccttgatttttaccacaaaaaaatgcagcaggccgtgattgtctcccggctcctgctgcatatactgctttatcttcctaccttattataattatacttccttcagggcctgtcttaagtcctctgccatcttctcgtactcagcgtctgtgagcatggtccttccgctgttcatctcaaaggtgccgccccattcttcaccgcccttatatttggggacaatgtggaaatgcaggtgatgtcctgtatcgccgtaagcgccgtagtttaccttgtccggctggaataccttatgtacggcacgggccacctgggctacctctgcaaagaaatcattcctctcctcgtcggtcaggtcaatgagctcgctgacatgcttcctatgcgccagaacaacccttcccttcttgctctgctccttaaatacataaagaaagcctgtcttcatttcacacacaggataaccgaacttagccaccagttcgccctgcatacaatatgcgcaattaggatcctttaccatatcttccatgttcctgttctcctttatgtttattcataccaacttaaacataccacggaacaagaggaatttcaattccaatatttgttttttctttcatagtacccacttcatggaatctatgctataataggtaggcaagtaccagttacaggagaaattttatgagcagagcagatttcagacgccggcagtcccgcaggcgcaggcagaagcttgcacggatgtcacggcatcttcctacattaattttattattagcaatcactgtactggtagggggcggcattttcgccctctaccggttcgttttagcgaaacagccggacggaacggtccaggtcatagcctcatcagggaacggctcccctaatccggacaggggcagcaattccgaccgctatcccgacggtagctccggccccacttccggcggcgattcatcaaaccagccttccgccgaagttccccaggacgacatttcccggctcatcgcacaggctgaccgcatcgccatgggttacgattacgacaaggcagcggagctcatcaactccagcggcctggaccttaatgactcccgcatgaaggaggcgctggcacggtatgaatcacagaaggcagccctggttccagccgatatgaacgctgtcacccacatttttttccactcccttatcatggatacctccaaggcctttgacggggactcggacagcgccaactataattcagtcatgaccaccaaggacgaatttcttaagatactggaggatatgtaccagaaaggctatgtgctggtccgcatccacgatgtggcctatgaggcacctgatgaaaatggaaacgtgcgttttgtaaagggaagcgtcatgcttccggagggcaagaagccttttgtcatgtcccaggacgatgtctgctactatccctacatggacggggacgggtttgccaaacgggttgtgattggcgaggacggaaagcccacctgcgagatggtcatggacgacggcaccacctccacgggttcctatgatttgattccacttttggaggattttatacaggaacaccctgacttttcctacaaaggggcaagggccattatcgcgtttaccggctatgaaggcatactggggtacagaaccgcctcctcctaccaggacagccccacctatgaggctgaccgtgagcaggcagccagagtggcccagtgtctgaaggataacggctgggagctggcttcccacagctggggccatctccacctgggtgtggcggatgatccggaggccggatttgccattgacgaggaacggttccgggctgatacggacaaatgggaggctgaggtggaatccctcattgggcccactgatatcatcctttatccttacggcaacgacattgccgactggcgcccctaccatcaggacaatccccgctttgcctatctggaatccaagggattccgctatttctgcaatgtggatgccagcaagccttactggacgcagatggggacaaactacttccgcatggccagaaggaacctggacggctaccggctgtatgaggatctcatccagtcagatccgtccaagaaacgactgactgatctgtttgacgcagcccaggtatttgattcagccagacccacgccggtaagctggagttaccagaagtaagggattaaggagccccgctcatattgttatcatgcaggcttcctgccgctatcaagcggcaggggcctgttttctttttcctgctccgggcgaacggtttcccgttgtctacatataataaagcaaggaattgatttctaattgaaaggagcttcttcatgattcccaaactggaagtaaacggggtcagctattcctaccattcattggatggtgaaacgctggcccttgatcatatatcatttgatgtgtcaccaggggaattcctggctatcgtgggaccttccgggtgcggcaagtccacccttctgtccatgctgtgcggactgactcagcctgaggggggcaccatcaccatagacggcgtccgcctgaccaaatctccttctgccattggatacatgctgcagaaggatcatttatttgaatggagaaatattttctccaatatatcccttggccttgaaattcaaaagcggttggacgaacctgccaggcaggaactgctggaaatgatggcagcctacggtctggcaggctttgaatatgccaaaccttcggagctgtccggcggcatgcgccagagagcggcccttatacggaccctggcccttaagccggaccttcttctcctggacgaaccattttcagccctggattaccagacccggttgtctgtgtgcgacgacatcagctccatcatacgccagacacacaagaccgccatactggtaacccatgacctgtctgaggccatcagcgtggctgaccgcatcctggtcctgtctccccgtcccggccgggtcaaaaaaatcctgtccattgattttccggaaaattgcatccgctccctggaccgcaggaactgcccggaattttccacttactttaatatggtatggaaggagctgaagacttatgaatagagataaacagcctgtatcagcctgcaatatgtccgtggcacagcaggaatatgtggcccgtgaaatacggcgccaccgccaggtgaccatatgccgcgtcatgctgctggtccttctcctggctctgtgggagctggcggccgacatgcactggattgacagctttattttcagctcccctgtgatgattgccaaatgcctggtttccatggcaaaggacggaagcctgttcctccacacaggggtcacccttatggaaacccttatcagctttgccgtatgcaccatcttcggcctggcatgcgccctgcttctgtggtccagcaaaagcgtggcccaggtgctggagccctttcttgtcctgttaaacagcctcccaaagtccgccctggccccccttttgattgtgtggctgggcaataacatgcggaccattgtggtggctgctgtgtccgtggctgtatttggatccattctaaccttatacaccggattttcccagatggatacggagcaaatcaagctgatttactccctgggaggcggaaggaaggatgtgcttttaaaggttctgctgcccggttccctgcccctggttatcagcaatatgaaggtgaacatcgggctgtgtctggtgggtgtgattataggcgaattcctgagcgcaaaagcaggcctgggatatctgattacctatggctcccagacctttgccatgaccatggtggtgacctccattgtgatcctctgcattgtgtcaggggtgttgtaccagattatcgcatatgcggagctgaagattaaaaagagacagtgagttaaaactgtctcttgcctgaaaatataagggacaggaggaatgacaaaccctcctgtcccttatatcctgtttttatcacacacatatcctttgttccaaacagcctatcccgcgttctctgccgcaaactggctgttatacagggctgcatagtaaccgccctttgccaaaagctccctgtggtttcccacctccttgatatccccatgctccatgtacacaatcagttccgcatcctttatcgtggataagcggtgggcgatgacaaagctggtccggccctccatcagtttattcatggccttctggattgccacctcggttcttgtatcaacggatgaggttgcctcgtccagaatcaggatttccgggtctgacaggaaggcgcgggcaatggtcagaagctggcgctggccctgggcgatattggaagccccctcgtgaagctccatgtcgtagcctcccggcatagacatgatgaatccattggcgtgggctgccctggcagcgtccacgacctcctggtcagtggcatccagccttccgtagcggatgttttcttttatggtacctgcgaacagccatgtatcctgcagcaccatgcctatcatggagcgcagggcctcccgtttcatatcccgcacatccacgccgtcaatggtaatgctccctccgtttacatcgtaaaaacgcagaatcagattgaccagcgttgtctttccagctccggtgggtcccacaatggcaatcttgtcgcctgcgtgtacatggaggtccaaatcatgaatcagggtccggtcctctgtgtagccgaaccgcacatggctgaaatccacatttccttcccggctttcggggaattgcggcttctctgcttccggcacctcctccccggcatccaggaactcaaataccctttgggccgcagccatggtggcctgcatgatgttggcaatgttggatacctgattgatgggctgggagaactggcgcagatactggataaaggactgtatcataccgatgctcagcctgccgttgatgcagagccatccgctgacaaccgccacccccacataaccgatgttggtcagagcctgtgttaagggcatgatgatgctggaagaaaactgcgctctccagccattgttatagagacggttgtttatgtcctcaaaattcccgatgacgtcctcctcttttccaaaggcggcaatcacgttctgtccgttgtacatctcctccacatacccggtaagctcccccagcgcggactgctgcccctggaaataccgctgggaatgttttaccaccttcatgctcaccaggccgcaaaccggaataacacaaatgccgatcagtgtcagcaccgggctgaccaccagcatcattacgaatataaataccatggtacagacggctgtgataacctggctgatgctttgctgaagggaggtatctatggtgtccacatcattggtgacgcggctcagcacatctccgaatgtattgctgtcaaaataggccagaggcagacggcggattttcttgtctactgccatgcgcagatcatgcatagtgcgctccgccactcctgccacaatgtactggccggaataattgaaaagaaaggccagtacatacacacagcccaattgtatcagaacagtgatgaacgttctaaatccctggaggaccccggcgccgtccacagccacggccaccagcgcatccatggccctgccaagggtatatggcccctgggtggtaaacacggctcccatcacaaggcaggccaccatgagaatgattctgattcggtatggtttcataaaacggaacagacggcccatggtgcccttggtattgattttcttatctgctgccctcacattcatttgcttcatgcactcatctcctcctctgacaactggctccggacgatttcctggtaggtgccgcaggtatttaaaagctccctgtgggtaccaattcccatgaccttcccttcatccatcactataatccggtccgcattcatgatggtgctgacacgctgtgctacgattaccacagtggcattccccgtctctttggacaatgcctggcgcagggcggaatccgttttgaaatccagggcggaaaaactgtcgtcaaacacatatatctccggcttcctgacaatggccctggcaattgccaggcgctgcctctgaccgcctgagacattgcttccgccctgggaaatggatgagtcaaatccatccggtttatcttcgatgaaatccgtggattgtgcaatggcggccgcttccttcacccgctcatcgctggccgaatcatccccaaaacggatattttccatgatggtgcccttaaacagcagggctttctggggcacataaccgattttccggcgcagggtcctcctgtcataatcctttacattgactccgtccaccagaacctcgccctcctggacatcataaaagcggggaatcaatcccaccagcgccgtctttccgcttcccgtacttccgatgatagccgtggtctctcccggcttagcttcaaagctgacatggctgacagccggctcttttgcccccggaaaatagaagcttacatcgcggaaggtgagatatcccctctgcccgtctgacagcttgggaaccgccggatccccgatggaattttcagtatccagcacctcacagatacggtccgctgaagcagcacatctgggatacatgacgaaaatcatggaaagcatggtgacagacatcatgatctgcatgacatactggatgattgccaggatatctcccggcatcacaggctccgtgccgattccctggcccgcgcgccagagaagccccaccacggtcaggtttaatatcagtatcagggacggtcccaacagcgacatggcatgcatcattttcatggcattgttcatcagatccttgttggctccgtcaaaccgcttttcttcgtaatcctctgtcccaaatgcccggataacccggatgccggaaagcttttcccgcataatcaggttgattcggtcaattcttgtctgcatctttctggaaagcggcatggctctcctgccaatcaggctgataataaacaccatcaccggcatggacaccacaagtatgcttgacattttcggatttttgctgtaagccagcatgatgcccaccacgcacatgataggcgctgtcagaataacgcgcaggaacatgaccatgaaattctgtacctgggtaatatcgttgttggtgcgcgtaatcaaagacgcggttgaaaatgtgtcgatctcggcctgggagaaatattccaccttcgtaaaaatccttctcctcacattccgccctaaacccaacgcaattctggatgcaaaaaagcctgtggtaatattacataccattcccagaatagcgatacccagcatgataacgccggtgtgaagaatgtaattcatatccttatccgcgattcccctgttgataatatctgacagataggtgggaagccccagcgtggctcctactccggccgccacactgaccagcacgcatagaagttccggccggaacgcgttcagctccgcaaatatttttttcatgttgcgcctccttgttcttgaaaataaaaacatccggaaaagcagttcagctctgcaaatacttttccagacattttaatccttttaaaatagtctccaaatcttctttgctcatcgtatccttctcagaatgactgcccatctgctctatcatgcccagcaccaatgaccgccctttttccgtgagggccacatttataaaacgggcgtctttgtcattcttgaccattgtaatatggccggcccgttccagacgccggcagaacatggagcagtttccttttgtaacatggagactcctgctcagctgagtcaggtttacctgtccgtccgccagaaagagatgattgagcacccttccctgttccggggtaatgccgaagggcctgcacttttcctccacacattcccggacaagccagttcaccttgcgaagctcctgaaaccactggtccttaaaattaataaacgccataaggaaccttcctccccattctcttgatttttatacttccccagatagtttatatataaactattataggatatcattacagccgttaaaaataaagagcatttttattaaataaatataaaaattcaataaattgatgggacttaccttacattttttgaagttgactgcataattattctcccggcagagaaacattttagagaaaaaatttcaagaagaaactcaaaaaaaatttcaggccgccgatacctctcatcaagatatcagcggcctgttttccggcccttattccatctgtttttttatctgcttttttatctgcttttttatctgctttactatctgttttgttatctgttttactatttactttattatctgcttcactgtctgctttgcttgtctgttctgttattttttctgcctgcctcacaccttgatccgctccgcaacctcatttccgattgcaaggcgcatattgttcattccgattatcatgctgtcccttccatgctggaacacattgatggtacttccctccctgatgtcatgctgatgcataaactccatgacctggggattgccgaacatccatttaatcgtacagacagcacctgccttaacctctgataatgactgcataaccacacctccgttgccttttcgttcatacccagtatgatcaggggggccctttttcatgccggcccttctgtttacttatattgtaaacaccctgaaggctgttagtcaacggcaatgtgggttaggcatttttaatcttttttattttttgatgcttagtcctccgggtccgtaaatcccatcagcctgcacacgatgaagccggctgcataggacgcgaacagacctacgaaatacagggggaatctggtggtaatgaaagccagggggattcctgacagctcaggaaccttggccgccaccttcatcacagccataatacttcctccgccgatacaggatgctataaacggctttccaaggggaatggtacagccccacatcagaggttcccctatgcccagcatacctacggggagcgcattcttaatggtctttttcagtctctggttctttgtctttaaatatacataaaacgcagctcccacctgtcccgctccggccatacaggtaacgggcagcagataggtgacgccgaaatccgctataagctgggtattgaccgctatcagcccatggtgcattcccgtcattaccagaggcagatagatggctgaggccagaccggccagcacaggcaccttatagatgataaagctgacaaaggctcctatggtctccgatatgaaaccgcctatgggctggaataccatcaggcccacaaaggtcatgacacagaccgtaatcagcggccgcaggaacatgtccaggaaatccggtatgactttttgaagctgtttctccagcagcactgccacataggcaataatcagtacagatatcacgccgccccgcccgggtgtaatggacacatggaacagctgtaccccggccagggacgaactgttcagtatggaggccaggacagcaccgataatgggacttccgccgaattccttggatgtattatagcctacgatgatgggcaggatggtaaagactgagtaggccagcgcgctcatgatcttgccgaaatccgtatcctgaaagcccgggaaaaatacataggatgattcatagacagcaaccaccagtccgcaggctatgaatgcggggataatgggaatgaaaatattagctatctttttcagcatgttcttgtaggggacattgttcttagccctgttttcctctttcaggagaacggcctcgtccacctcttcacttttaatttgggtcatatcgctcataagctgggccactgccgccgcagtgccgggccccagcaccacctggacatggctgccctcctcaatgacccccagtacgccctccagcttcttaagctcctcccgttttatatttcccggatcctttacagtcagcctgacccgggtatagcagtttgctatggtcctgatattggattcgcccaccaaattacagattgattgtgccagctctttctttgtcataagataccttcccctttcttatctcttgcctgtcataccgtcttttttagtatcgcccactcctgtaccgctgaaaaacctgccttctcataaatccttctggcaaaattggtttccgtcacaaaaatcgtcatgtactccgctcccatgttcttaagctcctgacacaggctgaagaacagtacattgccgattccccttcccccgtcagccgggtccactgccagtgccgaaaagaaaccccgcccgtttttctccggatacacggttccggctgtgcccatcaccctgccgtccctgtcctccactatgagaatcttcttatgttcccggattccgtcccggaattttttcaggaacgactggtccttcagacgctcaaacatttcctcatatccgaaattcccggcactgtcaaaccaggcaactctgattccctccgactccagctccatgatgtgtttctgtacatctaccggaatgtaaaatttttccagttccaggtaataagaaacctctttttgaaccagctcatacccccttctctgaaaaaatatatatcccggggaatctgtcctgattcccggcgccttattgtgctcatggccctcccggtctatgtaccaggacattttaatagggcatttgtggctgattcttatttcatgttttccctggcccttcagaaatgcttccgctttttccaaaaggctgctccccacacctctgccttcatattcctcttttaccaccagaaggaatatatagcccggcgtattgtcccggttttgtcccggcaggaattccttctggctgattgccgctgcaaaccctgccaggctgccggaatccgtaaaggccagaatgcatccctcggggtcaaaatccgctttatccaaaagctctgccttccattcttccggtgaatcataggccttataccggatacgcactgcttcctctttccacagccgcaccatctgcggcagcatggtttccttatacgtcctgtattgcattacgaacataccccccagctcgatttaatcttgtctttgcggattttgcgctgcactgcagcagaatcatggtgattgccagctttacgcttccctccgcctcctccaggctgtccctggcttcttccctggtgcatcccgtggctgtcatgacaatattttccgccctagttatcagcttcatatttgtctgcacaacatccaccatcaggttctggtaaaccttgccgatacccaccatgcttcctgtggatatcatattcagaaccatcttctggacagttccggccttcagcctggtggaacccgtaaggacctcgggtcccggtaccggttcaatggcaaggtctgcctcctttcctatctcagaatcacggttgcaggacacggccactgttctgcatccaatctttttggcatacctgagaccgtatatcacataaggcgtccttccgctggcagccagcccgatgacgatatctgccggggacagatgaatctctttcaggtcttcctcccccatggtctgactgtcctctgctccctccactgccctgacaaaggcaggggtgccgcccgccatcaggcccaccaccacgtccggcgacaccccgaaggtgggaggacattccaccgcatccagtactcccagccttccgctggtacctgctcctatataaatgatccttcccttttgtttcagactgtccgtacaccaggcaatggcctgggcaatctggggcagaacctcccctattgcctccactgccttcccgtcctcccggttcataacggtaacaatttccaggggtgtcatctggtccagccccatggtctccttattcctgctttctgttaccaacactgacaaatctatcatggtgtttcctccccttacaatgcgttttggttttcctccggtccctcggatttagctatatgggtctttctgaactgctccatacactcgtcataccgcttgtgcacataagccgtatacagaatatctatcatgttcagctgggatattctggatgacatggccccgctcctgaatatcagttccgttgcagccactgccaggttataatcagccagacggaccagaggcgactgctcaaacctggatatggtgataaccggcgcctccctcagcctggcctccctggcacatgttatcatttcctcagtaagaccggaatagctgacgatcagggccaggtcgcagcttcggatgtttctggcctgcaggagctgggcatgccagtcatcgcagatcacacatgccttgttgaccctaagaagcttcagatacatgtccctggccaccagcagggaagaaccaattccgaacagatacacggtctggctcctgtccagcagctccacacattgattcaggatatccaggtccacaagcttcctggtattgtcaagagacactatgttcttataggtcaccttgttcaccagttcctccaggctgtcgtccttttttatctcctgctccatgggccgcgtactctccctgcgcagggctgactcatataacagggatttctgcagctccttataaccgtcaaaccccatcttcctgcacaggcggacaatggttgccgctgaggaaaatgttttatctgccagctgctttatgctgtatcctgcggcttcctctggattttcccttaaaaatctgaggacccccttctcagccccgctggcctgcgctgaatattcctgtatcctgacaagtacacttttcatattggttccttcctatgactttatattactcttttaaacacttttgtcaatattatctgattttaatgaaaaaatgtttcatattttgattttttcgccttttattgcgcgtaaatactgaaaagccgccgcttttttactgagcggcggccttaccggaccataactatgcagcattacctggtatgatttcctgaaagcattgactggaagcattgactggaagcattgactgaaagcattaactggaagcattaaccggaaacattaaccggaagcattaactggaagcattaaccggaaacattaaccggaagcattgaccaacatccttaaccggaagcattattccccctccagcccggcctccttaggcagccagtccgctttgacatagtacaggaacataccggcagcgcagatgacccaggtaatgggccatcccgccatgaccaccatcaaactgtgagtcatgggcactgccacaagcaggtaaatctgtctcagaaccacgaagctgcccagcataaagaacatggggaccttggaaagtcccgcgccgcgcagggcgccgtttagtacctggatcacgggcatcacaatatatgctctggagaaaatgcgaagcatactgcttccgttcccaattacctggggatcattggtaaacacgctgattaacaggggcgctccgaaatacattcccactgaacctgccagaataatcagggaactcataacccaggcggcaaatattcccttcttcacccgtttatacttgcgtgctccgatgttctgtcccacaaaagtggtgatagccatattaaagctctgaaggggcagctggagaaatccgtcaatcctcagggtagcggaatatccggccatggcagccgttccgaaccggttgatataggactgcaccaccacgttggaaaatgaggtgatgctctgctgacaggcagccggaaagccaaaggcaatgattttgcggatcattttcttgtggaaccgtatcttgcggatttccaccttgtaatcctcacgggtatgcatcagcttgtgcatgaccatgaatgagctcactgcctgggccatgatggtggcaatggccacgcctgcaatgcccatgtgaaacccgcacacaaaggtgaaatccaggatgatattcacgatactggccactgccagatagagcaggggatgcctggagtcccccaccgcgcgcagtatgcctgagcccatattgtagaaaagtgaaaatgtgattccacagaaataaatcatcagatatagagaagaatggggaaggacgtcctccggcaccccgattgccctgaggaggggtcctgtatacagcagtcccagcccggtaaacactatgctcaacagccccgtaagggccatggcgctgtgaaccgcccggctcatagcctcaccctgtctggccccgaagtattgggaaatcaccactcccgcgccggtggacaggcccatgaagaaccccaccagcatattgatgaccggggtcgaagcccccaccgccgccagggcgttggtattgacaaaatttcctaccacataggaatccactgtattgtacaactgctggaaaaaattccctatcaaaagagggattgaaaaccagaaaatagactgaaagatactgccgtcaatcatatccgtattagcgctttgcaagacaccaccccattcccaatcattggtgaccgcccctccctgtaacttggaatataagaccattacaaaaaagagaaagcagtccataccgaagccgctctctctatcatacatgattttcgtggatttttctatctgtttctctttaattccttctgctttataccttttgttttatatcttctgtttcataccccctgtttcatactctctgtttcataccctctgtttcataccccttgtttcataccttctgctttataccttctgctttataccttctgttttatatcttctattttattcatattactgccacacatttcactgccacccctttttctccgtctcttattccgtctcttactccatctcctactccatctcttactccattcccttgcctcatctcttactccgccgccccggcaagcctccgctcctttttaatgctccaagcgtacatggcgcctcctgccgccagccagaacacggtatacagggcagttcccgccagctggggccaggcagcgtcccagccgattcccttcaagttcacagccttcagttccacggcaatattggcaataggcgaaaatatcctggatgcaatgctgagccatttgggcatcagatagtacgggaaaataagccctgaggtaaatataatcaggttgctgcacatcatatacagctgcgcaaagcaggccagccttttggtaaatgaccccagcatcacgccaaaggccacggccgccagcatgaaaagcacggtgctgaacagatagagcccgatttcccccctcaggggaatattcttatacagtcccaccacacacagcaccacgaactgggccgccaccgcgccgcccgccaccacggccgttctgatgattccgtcttttaattcctccccccgcttttccggggcagccgctgccagagctttcctttttcgtatcatgagcggaataaaaaatgagatgagaaaggtctgcatggtgatggcgggaaccagcagatagctcattttcctgatgtaatcgccctgtggttcatacaaggtcctgtccacgtaagaaaatgtacccagactggtctgggccgccgaggggtaaaagttgtttccctccagcatcttaagctgcattcccgcgctcatggtacccagcacagacgatgcagcccccactgccccgccgccggtgatgatgttggaacagtccgcaaatatcactgcctggggtgatttcttcagggacatatcccggctgaaattttcaggtatcatgacgccggcctcaatcttcttatccaggatggcctgtttcagatcctgctccgaatccgcataatatacaatatccagagagggattgatgccaaactgcttcacaatggactgggacaaggaggaccggtcctcatccaggattccaaagggaatatcctctgtgtaatcatttttccagatggtagtaatcaggagcataccggccagcacggaaataaacagaccgatgaccgtgtttttttcttccttccatatcctgcttatcatatgccggccaccccgctttccgtcaggggactatctgcgggcgtttttcccggctctgccccggcatccctgaatttctttgccactgcaagcaccatcaccgcgcagaagcccataagccacagaacatggtgggcctcactcagaaagctgcgctccaccagggccatgtccctgaacggcacaatataatgggtattgggcatgaaccaggtaagaaacttacagggccatggcatggagatgaccggaaatgtgtaaccggccaacagcatggtaaaacttatgatgctgcatttctgcactgcctcctcgcagtttcctccggtacccaggttctggagtattccaaaaagggtaatgccgaagcaggtgaaaaccgtcatcagtatgccggcccagggagaactcttgtagggaaatccaaaacacagggtctgggtcactatacagcccagggccgagacacaggcaataccggtgataaatccggcctttttcatcagccttccaaagcttcccctctcgcacacgcaggcccccacgcatccggctccaatctgcacaatggtaaggaggatgccctccatcatcatgtatgccacattcttggagggattgctgatggcctttgtcacatatcccataggtgcaatcaggttcatggctgcctggggcggtatgccctttccctctgccagcttcagcatatatccgctcttaatggtccccagggcttcggctatggtacccctcatgccgctggcaactgttgacagggcgccgtcgttaaaaatcatgattttggcttccctgccatttaacagatcctctgaaaaatgctccggaatcacaatgcctgccagtgccttattatagtaaaatgcttccttcaggtcatcctcctcatccgtacacgcaatgacgtcaaatgtcctgttatccgaaatcatctgaatcaggctctggactgtttcagagtgatcatggtttacaataatcgtgggtaccttctgaaaaggcagatgcacgaactccgcgcccataagcagactcaggatggttggtaccagaagaagaatcagcatgggaatcgttatgtaccgttttttcatagaagatgccaggctcccagcctgtttcatccattctctcatataccatcacatcactttccaaagtcaacataggctgtcataccggaacgcagttcatcctgcagtccagtcaggtcctcaaaggttaccttgattccgtaggtcaggatatcccagtcagcttcattggacgctttcttggtggcaaaatccgcttccttattgattcgcaccactttccccttatatgtatcctttcccagggctgccagggagatatccacctcctggtccagttttacccgcggaagcttcatttcatccacatcacaagtgatatacggggtataaatgtcagcaaccaccacggagggaagtccggaagacaccacatcaccggacttgacattaatcgttgtcaccagaccgtcaacaggtgaggtaaggacacatttatccagggtggtgtctatctgtttcagggccgccttggcctggtccactccggcctgggcctgggcaatctgttccggcgttgctccgttttgggcttcggaaagcttgctctgggaaatctccagattggagcgcgagctgtccagggctgccttggcagaagccagggctgccttctgggcatccacagaggactgggacacggctcctgctggaaccagcgccaaggtcctctgataatccgcgtccattcttgtgtaggctgcctgggcattttccaggtttgcctgggcaatctggaccgccagctgcagctgcttcatctgttcctctgtggcgccgtttaacaggctctggtaagctgcctgggcctgggtcagagctgcctgggcctgttctctctgggccatcagggtatcactgtccagacggaccagctcctggcctttggtcaccaggtccccttcctccaccaggacatccttaatctgtcccccggtcagagcgttaatattgctctcatccatggtcacataagactgtaccaccagatttttcttattcttaaataacaggtcatcccctgtcacatgaccaaagatgagcaccaggacaatggcgcacaaaataacggctgccgccgcccctatgatttttttcttagattttgccagtttcattgttattacagtttctcccttccaatatttctttcatactcccttacatttccgacgattttgcccataatctgttccagaacctgttcctcctggggtgtgattccggcaaagatgattttctcccactggtccatgatgtccttcagtgaattagctgcctcttttcccttttccgacaggcaaaccagcttttctcgtttattctcaggattaatctcccttctgatgtatccccgctcctccatggcagccaataccttggctgtctggtatttatcaattccggacaggctggaaatggtctcctgattgctgtatctgctgtagcctatgaccagaagcacgattccctcggaaaaggaaaggccgcaggccctaaatttaatgcacagaaaccttcgtttgctcttttctatcatggtggctatttcctgtatggtactcacctccttgcaggggctgccgcagatactgtaaagaaataccttctgcggctatcatatgtatttaacaactgttgtgtttgacaaatattatatgcattttgcaaatgaaaatcaacccgtttttttttcacaaaattacggcccaacttttaatatttctccgtttatttgacgggatggttcatccctctggcagcaagaaagaaaaatgccgtgagaaagccggtttcctggttgggaatccggctgattcacggcattgtcaccatgttttcacggcattgtcacagcgttgtcacggtgttgtcatattttgttttataccttggttgatgacattcagccatctcattccatcatttttataatcaggtccgcgcagccctcatatcctaatacagaggtattcagacaggcatcataattttccatatccccccagttttttccggtaaaatagtgataatagtcgcttctctggctgtcccttttctgtatttcttcctccgccttctcaaaggctatgtcatccacctcgcatatgcggcgtttgcgcttctccatggatgaagcgtagataaacagtttaagtacatcacattctccgtccagggcgaaatcagcgcatcttccgataaagatgcacggtcccttccgggccagcctgcggatggtgtcagatacctccttattgatatcaaagggctcctgcatcttattgtaattctggaaccggaaggcatacagcaccaaatcatgaagcaggcttcccgtccgcttttcatccagctttttcagttcctcgatgctgattccattgtctgccgccgtcactgccagaagctcccgcccatagcagggaatccccaggcgctccgacaggatacgggccacctcccttcctccgcttccgtactgacgctcaatggtgatacaacagttcctgcccatactcattccttctttcttatatgtctttcctgtatgtatgcaaatgtcctatcattatgcaggacgtccatatgccttatgatacctcaattgcatactttatcacatggtccttcttattctcaaacacatcataggcttccataatgtgttcaagctttgttctgtgggtaatcaggcagctggtatccagctttccggcctttaacagcttcatgatttcctcacagcaggaagcgtccactcctcctgttttaaaaaccagattcttcccgtacatgtccggcagggggagtatctgcggttcttcatataaagccactacacagaccactgcattgggcctggcaatcttccatgccatccgaaaggtatccctgcctcctgccacttccaatacggcatccgcaccccgtccaagggtcagcttctttacctcctgttccacatcctgctttaacgggttgataatgacatccgccagtccctgttccttagccagctccagccgttcatccgacgtatcaatggctatgaccatgccggggccgtaaagccttgcgcacatcagggtacacagcccggtaggacctgcgccaataacagctaccgtatccgcgggtttgatttccgccagggaagccccccagtaaccggtggaaaggatgtctcctgtaaacagcgcagcctcatctgtcacttcatcgggtatcttcgtaagtccgttgtcggcaaacggcaccctgacatattcagcctgaccgccgtcaatcctgcaccccagcgcccatcccccgtgttcatgggtacagttgttgacataaccccgcctgcagaaataacactcgccgcagaaagtttctacatttacggcaacacggtctccctgtttgaatctttttaccgctttccctgtctgctccactatgcccacaaactcatgtcccagtatggttcccggcacagcccttgggacagctccgtgctttatatggatatcactggaacagatggtggtaagggttacccttatgatggcatcctgcggatccgccagcgcaggaaccggccggtgttccagggttatgatgccattttctttgtagaccgcggctttcattataccgggcttgggattgcgggtatggggcgcctgaaactgggacatctgaggctgggacatctgagattgggacatctgagattgggacatctgagattgtatatcgctttgcatctttattatacctccaatgtactgctgttttctctaatatcatctaatcatataatgattaaaaatattatagcatatattacctgttcctaaaaggacgtccgtcctccttccgtctgctcctgttccgacccccacacccccaggcagaccggacttggtggggttattatatcctaaatccaaatctatttccaccacgtcagattatgaaaagattattaaattttataaaaacacagcagtacagaatctctccgcactgctgtgtcccttcactttatagttaataacatgttttacttaatatgccttcttctgtcaaataccgataaggtaagtacgattccggaaagaaggaacgtcaggctcatcctgtccattatattaccagtttttggaaggggagccaacggtatctcaccgtcatcaataactgtcataggtgcttcggccagcggaacctgagtttcctccagggtaactgctccggggcctccatttgtggatacataccttctgcctgatccgcttcctgagctgctgcttccgccggaactgcccgaactgctgtttcctccggtatcaggggtgttaccgcctgctgcggaccactgggctgcaaacactacgtcatgctcatacttagtgctcctgatttcatttaaatcatcaaacgaaatattcatatcgtccataagcgcagtccattcggaaagtgcatagccggaattggcttcagccgtaactgccccctcagggctcaccccatcctcccaaaatacaggttctccgtccgctccaataacaatgcgtccttctgaatcaagctctaccaggctcttccactccgtaacggttccatatgcccctgtaccgttgttccggatacgtccctgctgctcgttggaggattcaaagataaactgaatctcataggcatccggaattccatcgggctttttatccggtccatcgttatctgtcatgtagtagacggttatggttccattttccctgacaccctgaacaggttcataggacttcctgagcattccggtatagatataatggtttccgtctgccccgtcgattgattcaggaatcagtccattcagcctgccgtctgcttccggatccgtcccaaagggtacctgttccagaagctttctgtcaagtatattcgcgggaaattccttgtctgccatctccacatttacagtatacatattaatatcccaaactgcttcaaaggtaacgctgcccgtaaactcatggttgttgatatccggtgcctgatataactgatcggtcttaaatcccgtatcctgggattccacaaccctccagccgctgaatgcgcttccctccagtgaaggaatcaggttgtctgtaatcaccccatatttctgcaggctgtaggtcagcagcgggtccgtagaatcattcaatgttccgcccttcaaatcaaaaacaactgctatgctgtgcttcagctctccgtccacatgccattcatatgggtcgccttcctcatactggatcctgtaccatatgatatcgtccatggaataggtcttaccgtccatggtaaatgtatcgttctccggccactgcgctatgcgctctaaaaccgcctcactgctctggttcagttcaccttccggcgccggtaccatcaccggattcgcatgaaggaagccttcgccgaacaatgcataattgtaagagggatccggcacattgccgtccggccttgcagccttgtcttttctcacaaagaagccgctcttgactgtatcttcctcaaatacagctgtatatatcatattctttgtaaccgtatcaggaagctggctttcctgcaggaccgttccatccatacccatccagcctgcaaaccgcattgtctcatctattggcgtcttttcaccgataaagcgctccagcctgtcattgtatttataatcactctttgactgctctgtaaaagctccttgactgcccggcttatatgtcacggtaaactgctgcttaaagtaaagttttaatgtagtggaaccgtcctccttcaccttggcttctgtgatgttccttctgcttgtatccagaacataggtgcactcactctcaaccttatccgccaaatcctgttctgttactttggccatcccatgaagaggaacgtcatttcttgcatctgtgtatgtgggccggaattgataacgcccctgggactgcatgtaaaactccacatcgtaatgaatgttcttattgtcaaggaaattagctgtaaatacagtgtcgcagtagaacttatgcgcagctatgtcatctgtatcatcaaacacataatttggtatcagcgttttatagccgggttggctggatttccaattgttaaatgtaaatccgtcatccccaaggtattccacgccatccgcagtcggccttacaggagcgtacaggctcagctcttgggcagaatctctccgtgtagccacctccatgacagttcctgtcatggcgccgttggcaccggccctgtaggtaaaggtaacctggtaccggtccggtatgccgtcgggatttgtaggcttgccgctgtcctccggattcgtctctcctttttcatcaatgccatagtagacattcaccacgttgtccagagtaatcagtgatactttctttccgtccccgtcaatgtggtccagggcataatggtgtccgttcttatccaggacaggtgtcttatcaaacacaatgtctgaaccatactcagcatttgtcacatgctgcgcgtgttcatactgcctgtcaatgcggaaatccccccggtcattctcaaagaagtaatttaccgtatattccaaatcctgacgaatccggctggtgaccgccacttcatggtcccgggtacgtgacagggacacatatcccaaagccgccgccctttcaaactctgccccctgaagagactggccgtccacagtgatactgctgatggtgtaacctgtatccgcacggaaccttaccagcatgggaaggactgcgtcatatccgtaacttccgccctgactgatgctggagtgttcatccgaatccgtaatcagggtataccgcctggcctccgatgtcacatagacagaatggcattcctttctgtcaacccttacactgcccgcttcaatggcatcctgcagttcctgtccctttagaggaagggcatctacaaatactccggaaattccgtaacctgtttttgcctcaaaggtaacctctatggaggcctccgggtcatagctgtacgtataaatcctatcctgagggtatgtaatccggctgtgcaggtctgcgccggtggtaagggcatattccatgggactggtctctacaaatacgctgtggtcgcccttgcggtccactgaaacagaatgagaggccagtgccttcagaagctccgctccctccagggaaacgtcatccacgatcaccttgctgactctgtagcctgtattagccttgaacttaaccaccaggcatttgtccgaatcataggtaaaggtggtaacctcctgtttaggttctgtaatccggctgttttcatctgccccaacggtcagcttgtattcattaatcttaccggtgacagatactatgtggtcacggtcccgatccacttcaatgtatcccctggaaaccgcctccttcagttcatctcctctgtattggtgtaaatccacccatatgccggatatggagcagccttccttggcgccgaattccaccttaagtttttccgttccatcgtaggtgaaatccatagatggggcaatccagctgttatggtctgaatatgtggtcaaatgataactgtttatcctggtggtcacttcgatggtatggctgctcttataatcaaacaggtacgccccggccgctatggcggctgtcttttcaaacccgcttaattctttttcatctacaatgatattctgtatctggtaacctttctttgccccgaatttaaccttatacatgatgaactctttgtactcatagctctttgtctgagggttaatccaggaattttcatctgccctggccgtcaatgtatagagtgtcttatctgccttgacgaacactgtgtggtcctgcttacggtccagtgttatatgactgtaaccctgctggtccgcctcggccaatatggcctggatttcatcctttgtaaaggattttccatccacggtaatgccggtaaccgtatagcccttgtctgctttaaatttaacatccaatgtatccgtgtcactgtaggaatattttgtccccttagtaatatcagcattctcagccctggttataaggttatattccgtcctgacagaagtaaccgatacataatggtcctgtttgcagtccacttccacccagccgttctgcacagcctcattcaaagcttttcctgacagatgtacgccatccaccgcgacaccggatatccggtatccctgcttggccgtaaaatttaccctgataagagaatctgcgtcgtaagtatattgtttgccctggtcaatggcagagtttgcatcggaagccgtggtaagcgtatactgtttgggcatccatttggcagtgaggacataggtaaccggatttatatttatatccttccaaacatcacccacaaacagactgtcaccctgctgatatatcttactgccggcctgattcacatttgtctcagccagttcccatccaataaaatcaaaatgattctttttcaggttccctgaacccttgatatcaatatagctgtctccattcttgattgcaggatgggtataggttctgtagtcaaccggagccattccttctgctccattgccgtcatactttacctgaatctttgcaggcgttgcctgaattttaaattccctgtattggtaagcatcatccctgtaagagtaatggaactggttggtacagcctatggataccgcttccgcatttgcatccgaaaaatctctgcttgtatgctctgtagagatgattgagggcgcgtctgcaatatccacatagatgccttcttcaaaccgtgcttttgccaactctgcctcggacctgccgtttctgtgctcaaaggtggtaggagtcacatacccggtggcaggttttacatagaaggacaccatgtctgttctgtcagtctgaaggacctgtcctctttccatctccatgagtccgccgccgttgatgctgtaccataatgatatgttggaggaatcctggttgaatttgaaatggaactggttggctgcttcattgacaatgatgttgaaataatcattgtgcactacgtttccgtaccatatactggcctttttaccggctttcagcgctttaacatccgctgctgaataccattttccattctcttggatatccttcacgttttggattgaaaccacccttggatctgatacgaaccatgagcccccatatcttctgtctgcttttacccggaacgtctcgtccttacttacttccacggtagtcctggttatattttctttgcttattaccgcatagatggagaaatgctccgcctcaaagcttaacgtatccaccgctctgccgccggacacatccactgcgtcccggacctcctctaaagccttcacatccgcggcttctgtctccacatgaacaatggacatttcttcggcagtctggctggcttcctctacaggaattcctgaaaatgtaactgtcacagcgccttcctggttccagattccagcgtccagcctctggcttccaagccacaaatttatatcataagcagccactgatgaaacctgctttccctcttcagaagcagcttcctgggcattttcccgtatggaatcctcaagagcagaatccacccgttccgcagaagcggtcacgccttttggcaatacgccttcaggcgcgtaaaggtttataatcataccatcattcaccacaatggtatcagaaaattccggatgttcgtctgtttcagtggtatatacctcaatctccagttcatccgtcacatcctctatggtgaaccaggatatattttccgccgcgttccccggatctgctgaatccgggtcagctgaatcccccggggctcctgcctctaagatttcaccattggccgatactgactgtatatcatagccaacctgggttttaacgccaaatgtaaggcttccgccttcctcaacaccgcgcggtccatctacaatgcgggctgttccctgtgaatagacagcatatgttaccttataaccctcgaaatcattcaatgctttcagcgtattgaccgtggtggtataaaccctggccgtgctgcagtacccgattcccacaaggtcatcggatgtggctgctttcaccttatggacatcttctgcctctgtttcctccggtgtccgggatggctctgtctctatggtaatcacaggtgtttcatcggttatgaagtctcccgttgtttcagccggagaggagtcttctgttttcccctcctcagtttccttgctatcaccagattcgccggatggttctgagccgctggggtgtgccggctggctgggtgtttctgcctcgccggatgattccggggggccggatggctctggggggccggatggctccggattaccggatgattcctgactggcggatgactcctggttgccggatgattccggattagcggatgactctggattaccggatgattctggattaccggatgactctggattgccggatgattcctgactggcggatgactcctggttaccggatgattccggattacttgatgattctttacttccggatgttcccgtctcactggacacatttgtctttccagatgttttatctgcactgctgccttgattttcagcagtctcttttgttgtgttgtctgcttttgcgttttcttttggttcttctttttcttttgtaccctcttcaattctcacatctgaatcatgcttttcaggaagggatgctgtctcatcacctgtctttacagcaacaacaggcgcatagtgacggttaatggatgcaacaggtgtatcatcctgtttctcagaatgaatctgctccttatctgcatcgcccttctgttctacttcttcttttgcgttattgtatatttcctcggacttatctgtattctcaggccgggagccctctgattccttttgagcctcttctgtatcctgtctgccagtgtctgtcccctctgttggtgaagcagttgtttccttctgtccttcctctcctgcaggtgtctgtgtctcctgactctgagaggtctgttctgtggtttcttccagagttggttctgccggttctgactctgctggattagcttctgacgaagtcgtttccaatgggtcaggttctgacggaactgcttctgttggaatctcttctgacggtgctgtttctgctggtattgtttctgctggtattgtttctgctggtattgtttctgctggtattgtttctgctggtattgtttctgacggtcctgtttctgacggtaccgtctccgccggcttggatatgatatttacttcctcatctccaaatgcagcctcgtagcttttaacagtaagtttctttgttctctttaccttctcctttccatcctccattctggtgatggacgtggaacagctgatggagctttctccattattcacatacaggaatataatttcctcatctccggtgaccatatacatgtcatccgcatcctccggaagccggacaaatacacgcagctccgcgtccatgtctcctccgtcgtattccggataaatctcatatatatttccttcaccataaaataatgcctcaaactgttctgtcttgccgttggtaaagtcaatatccccctcctgaaggggacttcctgcagcaattgcttcttcaattgcggtaaccaggccggaaccgctcatctcgaaggttacgctgtcagaagattccgctgcatacgctgtcgtaaggtctgtaccaatattagtggtaaccataaccgcagcaatcatggcagcaagaaatcttttgcataaaccgtaaggttttttatgcagtgctcttgatcttcctttctccttcataccattttctcctcttcatacttagtcctatggtactaatcatatcaaatggtacgttatagaaagcgttaggtaggccagataatggaaattttcttaatgtttatttaaatttgagaggtaaaagaacccctggccatattgaccaggggttcctgttatactgctattttgttttacattgactgtaatggactgttatgaatcctcttctttacgtttcttgctcaacgctgttaccgcaacaaagattcctgataacatcatggtcaatgtggttctcatagatgtctgacctgtctttggcagtggtgccaacggcacttcaccgtcatcaattaaggttacatctactggtgattctggaagaggtgctaacggcacatcttctggggtgatggttgtggtacctgggccgccggttggtggtgtatagcgattattgccttcggtgttgccgctgggaccgccgccaccgccaggaccagtaccgccaccgccgttaaatctaaattgtgcggtaaacgtggtactctgtgtgaactctgcagctctaatttcatccgcgttggcataacccctgcttccgtctgtccagttattgaataaatagcttccaaggctggatactgttacgttagcatctggacttgcaggtttcagttccctatggtcattaccatcttctcctgtaacaatttcatagacagtcttgacttcagttacccttcctgatactgttccgcgatttgtgtcttccgatacatattggaacttaatctggtacttatcaggtactccgtctggttcatttggcacttctataccgatttcatcaacatcaaagtatgcgatgaaagtggtatctaccaaataggtatttgtcttcatctttgacatgtcaggagtgtagtcatttacttcgctatcggtccagtagtcaaatgcatatttattatctgcatttacaattatgttggcctttggacttgtaggtgtaggtttaatatagttgccatcattatctttaaatgtatgaacttcctctacatcaccgtctacgctaccatttcctgcacttacataagtgaatataatctggtacttatccgggatttcatccccattatcatctaatgcataataaacattaataacattctttgatatatcagtcccgattgtcagaggcaaattctctacataatcaagtgcatactttgttctcagcttttctttataagtcgttacctggctttcaaattctccgatgcctgactccaaagcctgcacatcctctattccatcatagaagtaatgcacactgtaactgaaagtatccttgctgtataccacgtttacgacgtctccgccatccgcgctgatattctctgctccgctcctggttccgggtactacgtaacccgctggggcaaacttgcttaaatcggctgggattgcatctccaaaggttcctgttccttccactttgtcaaggtagtttccttcttctatgctgtccttgtagtagttcaccgtgtataccaggtccgtcttcttgctgtataccacgtttacgacgtctccgccatccgcgctgatattctccgctccgctcctggttccgggtactgcataacctgccggggcaaacagctctaaatcggccgggattgcatctccaaaggttcctgttccttccactgtgtcaaggtggttctcttcttctatgctgtccttatagtaattcaccgtgtagctcaggttcgtcttcttgctgtataccacgtttacgacgtctccgccattcgcgctgatattctccgctccgctcctggttccgggtactgcataacctgccggggcaaacagctctaaatcggccgggattgcatctccaaaggttcctgttccttccactgtgtcaaggtggttctcttcttctatgctgtccttatagtaattcaccgtgtagctcaggttcgtcttcttgctgtataccacgtttacgacgtctccgccattcgcgctgatattctccgctccgctcctggttccgggtactgcataacctgccggggcaaacagctctaaatcggccgggattgcatctccaaaggttcctgttccttccactttgtcaaggtagtttccttcttctatgctgtccttgtagtagttcaccgtgtataccaggtccgtcttcttgctgtataccacgtttacgacgtctccgccatccgcgctgatattctctgctccgctcctggttccgggtactacgtaacccgctggggcaaacttgcttaaatcggctgggattgcatctccaaaggttcctgttccttccactttgtcaaggtagtttccttcttctatgctgtccttgtagtagttcaccgtgtataccaggtccgtcttcttgctgtataccacgtttacgacgtctccgccatccgcgctgatattctccgctccgctcctggttccgggtactacgtaacccgccggggcaaacttgcttaaatcggctgggattgcttctccaaaggttcctgttccttccactttgtcaaggtagtttccttcttctatgctgtccttgtagtagttcaccgtgtataccaggtccgtcttcttgctgtataccacgtttacgacgtctccgccattcgtgctgatattctccgctccgctcctggttccgggtactgcataacctgccggggcaaacagctctaaatcggccgggattgcatctccaaaggttcctgttccttccactgtgtcaaggtggttctcttcttctatgctgtccttatagtaattcaccgtgtagctcaggttcgtcttcttgctgtataccacgtttacgacgtctccgccattcgcgctgatattctccgctccgctcctggttccgggtactgcataacctgccggggcaaacagctctaaatcggccgggattgcatctccaaaggttcctgttccttccactttgtcaaggtagtttccttcttctatgctgtccttgtagtagttcaccgtgtataccaggtccgtcttcttgctgtataccacgtttacgacgtctccgccatccgcgctgatattctctgctccgctcctggttccgggtactacgtaacccgctggggcaaacttgcttaaatcggctgggattgcatctccaaaggttcctgttccttccactttgtcaaggtagtttccttcttctatgctgtccttgtagtagttcaccgtgtataccaggtccgtcttcttgctgtataccacgtttacgacgtctccgccatccgcgctgatattctccgctccgctcctggttccgggtactacgtaacccgccggggcaaacttgcttaaatcggctgggattgcttctccaaaggttcctgttccttccactttgtcaaggtagtttccttcttctatgctgtccttgtagtagttcaccgtgtataccaggtccgtcttcttgctgtataccacgtttacgacgtctccgccatccgcgctgatattcgttgctccgctcctggttccgggtactacataacctgccggggcaaacttgcttaaatcggctgggattgcttctccaaaggttcctgttccttccactttgtcaaggtagtttccttcttctatgctgtccttgtagtagttcaccgtgtataccaggtccgtcttcttgctgtataccacgtttacgacgtctccgccattcgcgctgatattctccgctccgctcctggttccgggtactacgtaacccgccggggcaaacttgcttaaatcggctgggattgcttctccaaaggttcctgttccttccactttgtcaaggtagtttccttcttctatgctgtccttgtagtaattcaccgtgtagctcaggttcgtcttctttgtataaaggacatctattacattgtctttttctttaattatatatggccctgctggcgtctggacaccatttttatatccatccggtatcttttcgttaagcaggttttgaccaaggattactccttccccaaaagtcttattggtcatttccttgcttgcgcctagataatgttcttcatctattacatccttataatagtgaattacataagacaaatctgtccttttggaatagaccacattcacgacgtctccgccatccgcgctgatattctccgctccgctcctggttccgggtactacgtaacccgccggggcaaacttgcttaaatcggctgggattgcttctccaaaggttcctgttccttccactttgtcaaggtagtttccttcttctatgctgtccttgtagtagttcaccgtgtataccaggtccgtcttcttgctgtataccacgtttacgacgtctccgccatccgcgctgatattcgttgctccgctcctggttccgggtactacataacctgccggggcaaacttgcttaaatcggctgggattgcttctccaaaggttcctgttccttccactttgtcaaggtagtttccttcttctatgctgtccttgtagtaattcaccgtgtagctcaggttcgtcttctttgtataaaggacatctattacattgtctttttctttaattatatatggccctgctggcgtctggacaccatttttatatccatccggtatcttttcgttaagcaggttttgaccaaggattactccttccccaaaagtcttattggtcatttccttgcttgcgcctagataatgttcttcatctattacatccttataatagtgaattacataagacaaatctgtccttttggaatagaccacattcacgacgtctccgccatccgcgctgatattctccgctccgctcctggttccgggtactacgtaacccgctggggcaaacagctctaaatcggccgggattgcatctccaaaggttcctgttccttccactttgtcaaggtagtttccttcttctatgctgtccttgtagtagttcaccgtgtataccaggtccgtcttcttgctgtataccacgtttacgacgtctccgccatccgcgctgatattctccgctccgctcctggttccgggtactacgtaacccgccggggcaaacttgcttaaatcggctgggattgcttctccaaaggttcctgttccttccactttgtcaaggtagtttccttcttctatgctgtccttgtagtagttcaccgtgtagctcaggttcgtcttcctgctgtataccacgtttacgacgtctccgccatccgcgctgatattctccgctccactcctggttccgggtactacgtaacccgccggggcaaacttgcttaaatcggctgggattgcttctccaaaggttcctgttccttccactttgtcaaggtagtttccttcttctatgctgtccttgtagtagttcaccgtgtataccaggtccgtcttcttgctgtataccacgtttacgacgtctccgccattcgcgctgatattctccgctccgctcctggttccgggtactacataacccgccggggcaaacttgcttaaatcggctgggattgcatctccaaaggttcctgttccttccactttgtcaaggtagtttccttcttctatactgtccttgtagtaattcaccgtgtagctcaggttcgtcttctttgtataaaggacatctattacattgtctttttctttaattatatatggccctgctggcgtttggacaccatttttatatccatccggtatcttttcgttaagcaggttttgaccaaggattactccttccccaaaagtcttattggtcatttccttgcttgcgcctagataatgttcttcatctattacatccttataatagtgaattacataagacaaatctgtccttttggaatagaccacattcacgacgtctccgccatccgcgctgatattctccgctccgctcctggttccgggtactacataacccgccggggcaaacttgcttaaatcggctgggattgcatctccaaaggttcctgttccttccactttgtcaaggtagtttccttcttctatgctgtccttgtagtagttcaccgtgtataccaggtccgtcttcttgctgtataccacgtttacgacgtctccgccatccgcgctgatattcgttgctccgctcctggttccgggtattacataacccgctggggcaaacttgcttaaatcgactgggattgcatctccaaaggttcctgttccttccactttgtcaaggtagtttccttcttctatgctgtccttgtagtagttcaccgtgtataccaggtccgtcctcttgctgtataccacgtttacgacgtctccgccgtccgcgctgatattcgtcgctccgctcctggttccgggtactacataacccgctggggcaaacttgcctaaatcagccggtatagcatctccaacagcacccgttccttcaacttttccaagaaaattattggcgcttgtgctgtccttgtaatagttcaccgtatattcatgggagatactcctataatacaattttaatacagttttattatcactaacttctgcgctcaaatactcataatttaatgcatattctttaagacttgatatgcttcttaaatcggtatatatggtatatgtttcaccataatacccttctatctgtgtctccagcaaccttccatttcggacgtatccggcaaaatcagttccttctttcgtaagtacacctaacgtagaactatccattactcccgtcaaaggctgaccatcttcggttaaatactgtatctgtaagttcgcttcattcggtttaatatatattcttactgttaccgtctgtgatgatttagaccatccaacgctgaatccattttcccaatcaatttcaacattgtcgacagttaccttagaaacagaatatgcattatccaaattaggagtaatatatataccacttactcccggatgtccattatgatagcttgtcaacgaagaacccataatatttccgcttagttcatcaattagttcatattgaattcttcttgtattatcattagtgttatcccaccagtcggacacggcaatttcaacctgcttcgccaactctgttctctgtaggtaataaaaaaccagctgatcagttgcggcaaagtttttccaacttccagaagatgtataatattgaatattttcgttaaaaaaccttaacttttcgattctttgcccgttttctacacggttaatgcctgctttattcgtttgatgatagtttgccggaagcactctgccatgccaaaaaataagatcatcattttcccttctccctgtagacggggcaatctcatttactgacacgccgccttcaccatactgagcaaggtctgcactgctaatattctttgactgtcgtccatccgagcctgtaacttcacggttggtaatccaatattccgcattaatatcagatgaaccgatgactgttattgtataatcaaactttgaataacgaccactttctgccaatactgtagctgttccagccttaagtccaactatatcaatattgttcctattttgagtaccactcgtaatacggataatatccgaacctgaagaaatactccaattagcttttgaaaggttatttccaatatactctttattatacagtgtcagctttccaccaatcgcaattgtagccgaatcaaactgtttattaccgctcacaaccgcataaatagtaaaatgttctgcctcaaaagaaatctcgccaaccgtctgttctccttgaacatctaccgtttcgcttacagtctcaacctttacgatatcttctggagcaaattcactttcctggctggctgccttttctttctcttccttattagcatcctgcactgtttcaacacatacaacctcaacaacatcagcctctgcactctgttctataatcggtttacctgtgaatgtcacatttacaagacgacttccactccacatctcagcatcaagaagtttatctccaagccacagattaatatcataagccataactgaagatacattcttttccgtatcagcactaagaatctcctgaacagctgcttctacattattattgacacgtacagctgtagcttttactcctgctggcagcactccttcttctgccattatgtggataaccattccgtcatccattacaagttctgcatcaaaagccggatgtacgtcagtttccactgtatagacttcaacttcctgctcttcatatatgtcagaaacagtataccatgccgtctgcgaaccatcctcattatctgctaccgagtcagctaccaaagcttctccattagccgtaacactctcaactgcaaatccaatctggttcttaaccccaaaggttaaactctcaccttccgccacgcccctggcgccatccacaatacgtgcgctggctcccggattaatggaataagtaatcttgtaaccatcaaagtcatccaaagccttcagctgattaatcgtagttgtataaacctttgcagtactgcaatatcccataccaaccaaatcagttgtcgatgccttattaactgtatcctccggctgaacctcaggttttgtaacttcagaaggcgttcctacctgaaccgcttcggttgcagctggtgtctctgctgcctctgtggtagtctcaggagccgtagtctcatcaccctcagacggagcagttgtagttccctctgtggtcgtttcactcgggtctgtgctctcgcctgtctcgccggatgtctcatccggtgcagccgttgtggattcttccgtatttccttcctgggcttccgtagtgctttctgtctctgccggggttggcgcctctgtctctttctccgtcggagcctctgtttccttaacaggttcttccttttcttccggctcagcctcaggttcctttgcctcctcggctttcggagcgtcctcagcattgccttcctcattatcagcaactaccggtgcgtaatggcggataatagatgccaccggctcgccggacacttcttccggttcaactgctgcttccggttcaggagcttctgtttcttttgtttctgcttctgtagcttcctgagctttttcctcagtggcttccggggctgtgattgcttcttctgtagtcgcttcctcggtcggagccacttctgaagatgtctcagtctcaccctcggtcggagccgtactgccctcttccggagcagttgtctgttcctcggtcggtgcatctgtagactcattctcacccggagcaactgtggttgtatcatctacggttccttcatccgttggtgctgtggtatcaggagaagtggtttcctcagttcctggtccgtttacatcttccggtgcgggagctgtcgtctcttctgccggcttggaaatgtagttaatctcttcatcgccatatgccgcctcgaagctctttacagtaatcctcttggtctttttgaccttctctacaccatcctccatcctggtgatgttggtggagcagctgatcgtatcttccccgttattcacatataagaagataatctcctcatcgccggtcaccatatacatgtcatcggcatcttccggcaaacgtacgaatactctcagttccgcatccatactaccgccgtccgggtcagggaatacttctaatactttcccctctccgtagaacaaactctcaaatttagcaatgtctccattggtaaagtcgagatcgcccggtgatattacattgccgttttcgattgcttcttcgatcgctgtcaccaattgggaaccagtcatttcgaatgtgacagactctgacgacgatgtagccgcataagctgcgttcaggtccgcacctacattggtgcataccatggctgccgctaacgcgaaagccaccagacgtttccgcatgttataaactgatttctttaacatgccagacctttttcgtccttccatacttacactcctctcatactttttctttctacatgattccagataaatccaactgtctgaaactagtatagcaaatcgcagttacaatctggttacaatttaagaaagtttaaaatttttcttaaattaattatgtaattatagattccctcgctataatcatagcaaagagggcgttatacaaagcgttatttacccctgttttttcgttactttttatttatatcattgaaattctatctgttttttataacttttccatccacttatatccatacttttccaattacaaaacgttgaaggcaatctcaatcaatgagaaaaaacctcatttctaattgtaatatcaccaatgttatggtaaaatggttttagatacgaatgacacatatttttgagtttttttctcacaaattgaggtgctatcatgctaatccagttcagttttaaaaatttcaaagtatttaaggaggaagttttgttggatttcctacctgcctccattaatgaacataaaaacacgcttctgaaggacccggctgacggagaatgcatccttccccttatcggaatctatggtcccaacagcggaggcaagtccacggtcctcaacgctttatcctgtctctcatccctggtcacagcatctgtaaccgtaccaaccagaattaaagatgtccattgtctgttttcatcagactgcaaagacatccccacccagtttgacgtgttattccgcagccagggatttctgttccgctatcagctccagttcttaaagggaaacattgctgaggagaatctgttctatggaagtctgggcggaagtgatacgggtattctttttaataggaaggaatccgtcatccatcctgggcgtgaactcatctccttcccccttaaggccgtacctccatcagtaactttgctgtcatggctcaatgcctatacggactccatgcacgccaaagccgcctattcctggttcagcagaatacagggcagcagtcccagagaactgccttccgatgccgatacacgccggaggctgtgcggtattctgcaggatttgggacttgatatagcagattacagcatcataccggactctgaccacaaatctcctgctgcattcctggttcacagtccttatgaaggctgtacctatgaacttccatgggaagaggaatccatgggcactaaaaaactgctctcactgctgccctcaattctgaccagcctggatgacggcagcctgatgatggcagatgacctggactgtattctgcatcctcacgcgctccgttacctgattgccctctatgccaatcgtgagagaaatcctcataatgcgcaattgctattcaccgcccacaatactgccattcttcagccagcacagatgcgcagggatgaaatctggctttgctgccgccaggaggggcaggatacggaattataccctctgtccagttacaaaaaagaaaacggcctcatcccgcgtaatgatgaagcctacggcaagcagtatctggaaggtcgttacggggccatgcccaatatacatgcctagcggattgattatatcgtcccaatgtacggataccatatgccttttgtatcataaagaaagccgccgcagattcatttctgcgacggcatatttaatacaagcttatctcttctattgtaatctttctctgcaaacattctataataggcttctcttataaacttctcctcattcctttatatcaggctctccggcatcacctggtaattaagcttcaccttcctgcccccatcccagagatgcaggttcctgtcaatccgctcataaatccgcaggcaatactcattggacgtgccgtttagcataaccagatattggctgggattataacaggtaaataaatcccctttcctgagggactttccgatggcatcgtggagcttctctgacgcggtttttaaaagctctccgcctgtatccagaggcttccccttagaatccagcaaagtacagcacagaagtacactggaaaaatccacccgctccgccatacgggccaaaagccggtaacagtcgataaaggccgggtacgcacagtaataaggcccgttaatcctgtccctctcatgaagactgtctcttatatcctttagcgtatcggatgtataacgaatctgtccgctcatgatacggaaccgttccagcatcttctcggaaggaggcagtccctgttcctcaaaatactgtgaaacagctgtatcgtatacctgcatggcctccttgaaccgcttcatggcaatgagacagtcaattttcataatctggcattcctcatacggatacagctcgcaggcataattacatatctccagaagtccgttgtattcccggtttttcttcatgagactgctggcaacccgcagacagctgaaataaagctcctgatagcggactcccaccactgatacccatttctcacctgcaagctgggccagaaattccccctgatacagactacaggcccgtttcaagagtgcctcatcatggttgcgcagggccacctttgccgtattctcaaaatccctggcatcaatgtacaccggcagttccccgccatcccatctgtagattcctccgtctgtgcggatatattcccgtggcggcagctcactaccctccaaaagtttgcggagccggaataccgtagcccgtaaattccccgaaggattggagcattcaccatttccgtaaagcatatccagaagctcctccctgtgtacgccctcctcacccgaataaagcaatataagaaccagctgcagtacctttcccgaaggccctccgggaatctgcaggggctttctgttatattccagcatgatgcttcccatcataaaaacggtcaggccttccctgtctctggccggataatatgtaccttcctccttcatttgtatcccccttgtggcaaagcgttatttaatatataacacattttactacagattcttttatttttccattatttatccttcataaaccaaaaatagtaaggaacctccaccaaaagcatgacactccagcctatggcacaggcatatgcaacccccaaaagtccgattccgggtgtcagcaggtatacaaataccactcgcaggctggtctggacaaaggttcccaacagtgtcacgctcatgtttcccattcccctgaaaaatccctgaatcccattggtaaacgctggaaacacataaaataacgccatcagtcccagataactactgcccaatgccacaattccttcatttcccgccgttacaaacagccccataagcggccttctgaataatgtgatggttatgcagataaacacccagtaacatgcttccagcataaggcctctcctgaatcccttcctgatgcgttccttcctgcccgcccctctgttctgcgccacaaatgtggtaattccatgtgaaatgctctgctcaggggtaaaggcatagtcatcaatacgattgaccgcgttgaaggccgcaatcatatccacgcccagcggattgacagcaccctgaatcaacagctttccgatgggctggcaggattgctgcaaggctgtaatactgccgtaacgcagtgtctgcctgagaagctgcctgtccatggtgaactctccccgtctcaactgcagcataggaatttttctgtatacatatattatgcagagaacagctgaggccgcctccgccactaccgtggtaacagcagagcatacaatgccaaatcccagccccccaataaaaatcagatccaaaaccgcgtttaatatagaagaaaaagctaaaaacttaagtggtgttttggaatcacccacacttttaagggcagccgataccgcgttataaaagtaagtaaacggcgctccaagaaaaataacagacaggtaagaagccgccttgcccagtatctcatccggcactcccagtgctcccagcagagattttgagaaaaatcctccaagtatggctattatcaccgaaaaatagcagccgaatataactgttgtagacatttcccgtttcagcttttctttctgtcctgctccatagaactcactcatcagcacagacgcgcccatacagatacccgatatgccgagtatgacaatattcatcaccggactggccgtaccttccgctgccagcgcttcctttcctatgaatctgccggcgatgatggaatccactgcattgtaggtgagctggaacatatttcccagaatcaggggaatggaatagtccaccagatgttttgtaatgctaccttctgtcatgttaactgccgccatatggtactccttctgacactcattttatgtaaatacacttaccgcccaaaaggcccggcaagaccttctgaatcttttcaaccttctgccgggcctgaatctataaagaatggaacgataatgatattctgttaataactgcgcagcttatcttcatcatcttccgtggtcttatcaatggagcgaatctccacatcatatccaaaatgatcgtctaccttcacataaaccttatcccccatcttgcggcctcttatggccttgcccaggggcgaatcaatactgattaatccctgaagggaattacctctgacagtagttacaagtttataacgttccgtctcatcatcatcaggaatatagacctccactgtatctcccaggcccacttcgccttccctggaattatcggatataattctggcggtttttatcattttctccagatagcgaatcctgctctcattcctgttcttatcctgcttggctgccttatattcaaaattctcacttaaatccccatgggccctggcttccttcactgcctccagggcttccctgcgtaccactaatttgcggtattctatttcttcctgcattttctttatgtcattggctgtcagattatcatacatcctattgttctaagtcctttcttttccggtaccgccggaatcatttttaaaaattctctctccgccatgctgttaagccttgccttggggactacggatatttccggagctgtccgccggcgcttaagtcatacacatttccgggagccaggtttccataatccacatgggcaatatatggattggccttattataataagcggcaaaaatgcgctccacatcctggtttgccgtggtcttaaaacaccggtccaccatcgtctggggcatcagccctgtcacggacaagtccaccttataccaattgcctcctgcttccacgtaaacaaacatgtggtccttatcattatcatccggcgcacagaagcagttaaggcccatggacctggcaagcatctggtatgccacggaaatgccttcgcagacagccttatgattcaccaggcagccgtaggctgtgaaggacaggtctccggaagtgtcctccccgttcacaaaccggttatacaatcctgtatcataggtgcagcccgaggcaatgtaaagagccgcatgctttgcccgttccagttcactgacatctctccaccggtagctgttcagataatcacggatcaccagggccagtgcattgcgccgctgtttatagatatcgcttcccacattttcctgatacagggccacctggcccagcaccagaaggctgtcgccgtccacagccatttcccctgttcctatctggtcgctttccccgtacaatgccttgcacaaatcatcggaaagcccaaaataattgtacagcccataattataatcctggcgcaggcgcctttccatcacaggttcaccctttgcattccatcccatgataacgtccacatattgaagcccggcctggtccaggtagtccttcagagggtaattggcatcataggatgcttcccatcctccaactgtccacgctccgtccggtcccacctggtacccgtccggtgtgactgtgtccgtcagcatcctgccgtttgcgtcaaaataataccattttccatccgtgctctgcatccatcccctggcataggaaccgtcgtccttctggtatctccatgatccgtccgcctgggaccaggctcccgcatatacaggggtggttaataaaaaggctgctgcggatgccgctgccagcagccgtatcattgaccggcctatatttgagtgctttatgcccggtttcttcataccggattccatcataccagatttcttcataccaggtttcttcataccaggtttctccgcttgcttcatgtctgcctgcctcctgccgaatcgtctaaccataatctgtctcctgcttttataaattatttattttccctttagtttctttattgattctttagcgtgtgctcaaactttggccacattttccctgtatagtaatacttgtaaggcgatagaccttttactatacaggaaaacactttttcatacctatgaccggcagctccccttctgccggtcccctccaaatgaaagataagtttaccgattcaggtaaacttatttttttatgcgcatatgctataaagaaatcatttttacaggagaccattatggccaaccaatccgtcactcctgctgacatctttgctgatttgctgcgctttcgggcccctgccgccattgcctgggtcagaggcggggatgccgcgcctaacttaagcggcctggtaaaattctaccagactccttacagtggtgtgctggtggaagccgaaatcttcaatctgcccaacaaacaggaacccggctccacagacttttatgccatgcacatccaccagaacggtgattgctctgatgacttcaccaaaacaggggaccactacaatccgtccggcgaacctcatccggaccacgcaggcgacctgcttccccttcttggaaacgaaggttatgcctggctttccttctatgacaagcgcttctccacagatgacattatcggcaggtccatcgtcattcacagtcatgccgacgactttacatcccagccctcaggaaactccgggaccaaaatcggatgtggtgtcattgaaaaagcggattatctaaaagtatagcacaatggcaggaaaatatcatccccgcagttttcacaaaaacatccgggataaacattcaggaaatacggcagaacaaattaaaagcagaaagtaccggataccgccattaatacgtgcggaatccggcaccctccaggatatccaggtcccggaatacagcagctgccgctgtctcgtactcttccagtctctgggatttctttattctcttaatatattttccattgtcggaaaagatctgaatcatacaggcccacaattccttcattttaaacaggacgtttctgtctccggacatgatttggcggtagccctcgtatatcatctggtggaatcgctttaaggtttctttgtcagttcccgaaccatcggaattcgtccctgccgcaatcctgtccagcagtccgggattggatatgattccgcggcccagcattactctatccaattccggataatctccgcataatgtctcatagtcagatatagtaaatatatccccattatagcacaccggtgcccggctgccgtcaaacccgccgcgaaatgccggcatatttggggtattcttatagtaatccgtgcggactctgggatgaaggattaattctttcagcggataccggttgtaaatttctaaaagtcccgtgaattcatccggcgatatcagccccagcctggttttcacagacacctccatgcccatctcatccatcttcccgcacacctcgtccagaaaccggtccaggctgtccggctgccccaggaaaccggcccccttgtgtttggataccacggtgcctgatggacagcccagattcaggtttatctcagaatatccgtactcctgtaattcctttgctgtccgtataaaatcccctgcctggtttgtgagtatctgcgggacaatgtacataccctggttgtgttccggcaggatgtcgtttaactccctgaagcttagattactgttggcctttggagacaggaatggggtgaagtacttgtccatggcatgatagcaggcatgatatgcattgcggtatatatagccggtaaggccttccatgggcgctaaatagtatttcatagacggattatccctctcattcatttttattgcagttctctgttttgtaaatcattttccggagaacctgttaaatccattttaactccataccttccctgcaaaatatgatttgaagaccaaacaaatattgatatctttctgagtgtaaaaattgcattatcttttctctatcattctgaatagcctcttcacttgaccaccaacctttacattcaataatcaaaatattattttggttatttccccgtttatgtaaaatcaaatccggataacagccattaggccagcctggcagccgctttatcatatcaatatcccgattatattccgcatctaaatcatatttttttagaaagctgtttgattctatatatttatttaagtatgtaccaaatctaaaacaaatactgcgttcatgggcatgaacttctaagtatgtcttatcattaatcagactgctatccactaaatataactcatttccagctttttttaggcacttgataatttcttctttcaacttttccttaaaatctattttatatatttctctgtggtcctcaccgtattcacacataatttcctcatttctaacggcaggtatcattagccgctgtatctgcaaacagttggacagagataaataaccagcaaccagcctaagttactcctcttcaaaaacagaacccccaggaagctgcaactccctgagggttcgtctgtgcatcattggaacacattcgcttttctgctgtgattatattacgccatataattaaaaatgtcaatatgctgttgactctttccagcaggaaggaggtgctcacatggactacataatagctttccttatctcagtcttggcaggtatcgttggccactttatctacaaatggctagaccgggataaatagcaacagctagcctaggttatcccaaccaccaagtatttcctatatcttcaaaaagtcttattccgtaagcgttatattagaatttcccagctttagaggcttcctcaatactaaccgcaatcgccaccgtcataccaaccattgggttattgccggcaccgataagacccatcatctctacgtgtgcaggcaccgaagaggaacctgcgaactgagcatctgaatgcatacgtcccattgtgtcagtcataccgtaggaagcagggccggctgccatgttgtcaggatgcagggtacggcctgtaccgccgccggatgccacggagaaatactttttgcccttctctacgcattccttcttataggttcctgcaaccgggtgctggaatctggttgggttggtggagttaccggtaatggaaacatccacgccttccttccacatgatagcaacgccttctgttacgtcgttagcgccgtagcagttaacctttgcacgaagtccttcggagtaagactttctccacagctccttaacctcgcctgtatagtaatccatctctgtctctacataggtaaatccattgattctggagataatctgtgcagcgtcctttcctaaaccgttcaggataacacgcagtggtttctgacggaccttgtttgccttctcagcaataccgatagcgccctcagcagcagcaaaggactcatggcctgccaggaagcagaagcagtcggtctcttcttccagaagcatcttgcccaggttgccgtgtcctaaaccaaccttacgctggtcagcaacagaacctggaatacagaatgactgaaggccctcgccgatagctgctgccgcgtctgctgcccttctgcagtccttcttaatagcaatagcagcacctactatgtatgcccagcaagcgttctcaaagcagattggctggattttcttaacctgatcatatacgtccaggcctgcatctttcgtaatcttctcagcttcttcaatggaagcaatgccatagctgtttaatacagaattgattttgtcaattcttctctcatatgattcaaataatgccatcttcttattcctcctattcggtcttcatcattctttacgtggatcgataatcttaacagcgtcagcaacgcggccgtactggccctgtgccttctcccatgctgtgttaggatcgtcgcccttcttgatgaaatcagtcatcttgccaaggcttacgaactgataaccaatgatctgatcgtctgcatccagtgcaataccggttacataaccctcagccatctccaaatagcggggacctttcttcagggttccgtacatggttccaacctgggaacggaggccctttcctaaatcttccagaccagctcctacaggaagtccatcttcagagaaagcactctgtgttcttccgtatacaatctgaaggaacagttctctcatagctgtattgatagcgtcgcataccaagtctgtatttaaagcctctaacacagtacggcccggcagaatctctgctgccatggcggcggagtgtgtcatacctgaacatccgatggtctcaaccagagcttcctggatgattccttcctttacattcagtgtcagcttgcaggcaccctgctgaggagcacaccagcctacgccgtgggtcaggccggaaatgtctttgacttcttttgattttacccattttgcttcttccggaattggagcagcgccatgatgaacgccctgtgcaactgtgcacatctcttctacttcatgtgaataaatcatgtgttaaaactcctttcaaaaatgaatttgatcaagtacagtgcccattcgttaaatttatcacatcatacttggttctattctctcacaaaatccgacattttacaagcatatttttttgatttttgccccctaaactttgcccctgaactttaccccggcttatgcctatgccttcatcctcttcatgatatgaagataatacacaaagaaaatgattccttttacaatacttgaaatagtcagcgcccaccaaatgccgttcagtcccatggctgttcctcccagaatcacggcaagcggaatacgcgcagctgtgaggataatggttatgacagatgcctccatcgtctttcccatgccggacagggcgcctacggtcatcagctccacgcacatgaacatttccgaaaaaccaataatccgaagataatcagctccggccggtatgacctctgcctcatgaataaacaggctgaatatgggcgccgctccaaatatgagaaggcaggtggtaaaaatgccccatataaacatgatgacagatgctgtcatgtaacctttctttacccgcttcaggtttcccgcgccatagttctgcccgacaaatgcattgatagctgtcccaaaaccatctgctgtcatccaggatatggattcaatctgtccgcctactctctggactgcaaccgccgtatccccccatgcagtgacgaacctggtaaggaccatagagattgcgcagtacagcatactctgaattgctgccggaaatccaatcctcaccatggttttaatattggatagaggagtgggaatccaaacccgcatctgggatgccagcacagggtcccttctcatagaaataaccaggaccagagccacaatgaactgggctgtcaccgttgcaatggctgcaccggccactcccattccgggaattggccccaggccgaagataagcagcggatccaacacaatattggctcccatgccgatacagttggccacaaaaggcgttctgctgttgccggaagccgtataaaggcccgtcagtgtctgtccaataaatgcaaagagaataaggccgcatgctattctcagatacacaattgcattttccaccaccaggtttgaattaagatggaaaaagtctatcagaggccctgcaaaaagattggttatgattccatacacagccgccagcaccaaagccagctgcagggctccctttccgtactggaccgcctccctgcggtttccttctccataggcatgggcagacttcacctggcctcccatcctggccagggttgcaacgccggaggacagccaggtatacatggctgccgcaccaaccgctgccaccgcatcacttcccaccataccaatccaggccatatccgtcagattatacgcagtctggaccagagacgtggccataataggaagggccagctccgtcagagatgtaagtatatttccatttagtaagtctatattctttttcactaatgtcacctactgtcatcgtatttgcataaagcttctattactatactatttatctgctttatatgcaatatgcataacagtcaggaggacagtcagtatacgcgtatacgtctttggctttcagcgaaaaggcatcacataccgtacaacagcgcctgtacaatcagatattggtctttgccatagcaggtggaaagcgttataagtttctcatccccttccggagtgattcctgtttcatagagggacgctgcccccatcttctcaagataaggcagccactcttcttccataaagttagtgccgtaggctccggcatcgctctgatgacggatctgacatgaaaagacaggacattccacccactttcccctgtaaaatatctgtataacagggttttcccggaaaaaagcttcctcaccatattgtttcaaccctgcaaacatgcttccgtccttcatgttatgtccgtacagcaccgtattgtccacagccaggggaacagccgaggaatccgcaaaaacacagcctgttatatgctgttcctgataaaagttatgattcagataatactcattatcttcatgcctcaccaccggataatcaatgttagttccaggtacagccagccagaactggtattccggattgatggaagcaagggcctcttcatttaagggagatttcctatcaggattttccccatccgtttttttctccgcgtcagaatctctccctccgccagcacctctctcctcatcaacatctctctcctcaccagcttctctcccctcaccagcttctctcccttcaccagcatctctcccttcaccagcttctctcccctcaccagcatctctcccttcaccagcttctccttcctgcccctcattcttcccccttccatatgcctcgtcctgcaccataccatatattcggcgcccatcggcataatccattcccatcttcaccagcaaatgcatgctgaacacaacgcccgcaaaaaacatgaacatgaccgccgccatgccataaggtctggtattctttatcagagccagaaccatagctgcaatcaataccacaaaacaaatcccggctgcaggcacagttactcccagggaaaagaatggctgcacattatttttagtaacatacctctcatcaatccccgaatctccaatctgtccgctctcttcatccccttcgctgtcattcaaaaatacattccggcttacctcccctccataaaccgcagtgcagtccgcgaccattttgcgtccaattgctgtcaaattccggcataacactccatcactttcatataccccgccatcccactggaattggtcaattctatacgcttccgaatccagacctgcctgtcctaaaatttctgcctcatagtccatcaggctctccctaatctcctccttctgtgtttcaatccttacaccgccaacttcataaaaacctgcatcataatccctcaccgttaaatccagccgaaatccgtcctcccaatgcttatcagaaaaatgataactcacaagaggcagaaggacattccgctcctttcccgatatatcgtccctggccagtacccaggcggtttgagggacaggttctatgttttccatggaggaatatactattttccctgagacagatatactatctgtttcctccgccagcacatcaaaagccagataaattgttacgggtatcaaaaccagaataaatatcacccattttctgcccttactccattccctcttccgtttcatacacagacacatactgaagcccgccatacataaaactgccattgcggcggccgctgccacgggcaggtcgtctccggtccttactgtatccctggggccggatccaaaatgatatgtcccttttccaaaccggctgccaacttgatacacagcagtaatgcttccaattttcctgaccggcggtttttccttccaattatatatggttacgcttccctgcgtcactgcttcgccctgtattctcccctctgcatccagcgtaaactcatataccttatcagacctctcataccccaaaggggcttctgtctcacgaatgacatacaggcccggtgttgccaaacggcaggtaaatgtaccatctgctccggttacggcttcggttatagttccagccgcagatccgtttgtccccttgcccatattctccggctcctggtcccagacacggttttctcccttccctatcctgaacctggctcccataagaggcagaccgctgtctccatccagctttgtaaccgtaaactccaattccttgtccacaacctcatatgcgccccttatgacatcacttccattgacggtaaaactgaatatgccgggatttaatgcataaccgtccggcgcctttgtttcccggaaggtgtatgtaccattgtcaggccttcttatgcggaatgttcctgtactgtcgctgacagaggtgccgattgcacggcccgtctggtcataaaatgtaaattctgccccctggagtacctttcctgaaacatctgttttcttaaatgtaatgtactctgcctttggtctcggcctgtttcccccgcctccgccggatgaggatgctgtccggttctcaaacctgaatatctgaaccatgttatgcaattcattcccggacttctggtccatctccggtccttctgtccctgaccattcttttaccacgatttccctgtcctctgttctctcatagccggatggggcctgaagttcgtggatgatatatgtgcctggtttcagaccgtaaaactgctgcccccttcccgcctcggatgtccactcccgaatcacccttccatcagacttatcaatgagctgcaatctggcgcctcccagaagttttcctgtttctgccgacgttttttccacatctataatggttgtataattgcgcatgaccagatggggaatctcggtcataccatcactgatagtaaactcaatgggcgtttcctgcagtttatatccctccggcgccttcacttcaatcagacggtattgtccttcactcaggttctttgtataatgcccctgcctgccgctaacccattcctccgctgtctcccatccggattctgtcctgcgttcgattcgcagcagcgcgccttccagcatttcctccgtatccccggacagcttatccgtgattacccggttggaatcattggtggggttatattcccagacaatgatgtctgtcagttcattcctgtaatgaaactggaactcatatggctcaagtgtcagcatgtgccctggggctgcctttgtctcactgcacacataggtataaggtttaaaattcccatcccggtccatgtatccaatgggttgcggttcaaattgcgcctgtcccagctggtccgtgatcacggtaccgcatatggcaccggttgtctggttcacaaggcaaaactcagcccccatcaatttttcatccggcttatctgaatcgctttttatgattcggagaattccatccggaatttcatctgtcatttctgttttttgcaggacctggctgtccgcaatggtaaagggaatatctgcagattgcaggaatccgtacggggttattatctccctgagtatataatcaccttccgggatatactccagtgtatggggttttaaatctcccggctggaaaccggcagggataagcccctgttccccatcctcctccgtatatcttccgtccagccccgaaatccataccgcctctatatcctgatattgtccgtcttctgagggctggtggagcacaagaggtatttccgatacatttcccttttcatccaccggatacacagcaagttttgcaccatttacctccttgccgccggtaatatccaccttggaaacctccagctcaagaggcttatcccccatctgaaaatattgtatctcttctaagtgtcctgtttcttctatattaataagtatagggtccgctgtggcatagccctcgggattttctgtctctgccagcacataatttcctacaggcagatattccaggcgcacggtgccttgctctgtataataataccgtccctggtatgtgccgggaatctcccggaagtcataatcatacttcataattggatgatttccgcctgcgtccgggaccacgcggccagttgctgccacatcctgcccgtctttataggtagcggcccggaaggtgaatatccttcctgtctcatcgtacctgggaattccatgttccagcaccggaaatcctttttcatccagtatgggccggtataaagtcaggtatgcttcgctgtccccgtagattacatcaccatttcttgtgtcgtatttcagaatatctatggatgtaaaatcatcctccatctcaaagctctgtacatcacctgtttccaagacttcaatatttacagcctcagactgaacataaccctgttcatagggacaaatggtttcctccagcacgtaatacccaacagggatgtggtcgatccagtgaggcttagttgtcgtttccggctccccatgttcatccaattttatatttccgtcatcatcgtactgatatccgctaatccatgaagcatagacctggctttttttgtatatgccgtcctgttccctgtgagggctgccgtcactgtccagactggcccggtacagggtcatgactgctccccttatttccttctgcgtccgcacatccagcttcgcaaatgcggtcttggtaaattcattctgcaggaaatatttctgcacctggtccgtatcctgaagtacaagccccatatatctggcctggatatatccctggtcatagggaactccctgctcttccagtatataggatccaaagggcagacgggcaatcaaatgcctggcgccggaagtttcctgagttccattagaatccatgctgctgtctgttgtccaggactcatcctttgtcactacatttccgcttgtataatagattggcagaccattctcatcatccacagttgttttgttgtcatagatggtttgtccattttcatcttttaatacctgtatggatttgaccagtatcttatttccctcatcgtccgccatgtatgccagcatacggccataatcatcatagacatatgccatgccggtaacggagtccgcaaagcagagcggatttccttttttatccagtaccagcagttcgcccgtatccgggttctccctggtatccacctgagtcaaatcatagaaatacagatttacagggtcattatccacaataacagcatcccatacatcccacgatgccgtatgtgttttcacggcaccgtccggactgttttcctctccaaccacgcgtatttccttatgggtaccggtatttgtgtccatgatccccgttaccttgccgtccttgacagaagcgcttacccccttatagacatgttctcctgttttttcaatttccatggcatggtacagggacaagactgcgccggatacggaaatgtcaaaccggattcccctgcctgtaaaggtaccgtccggctggtacaatggttttacaccggacatggccttaagctccttttccgtgccctccactatatgttctgagtattcgtcaaatgatttggtcacgtatccatcccactgcattgtcttcggattgtaagcaatatcccttacatctccccgttcctccagcttctctttacggccgcttaccttataaaccagcagatctccggcgtcatttaccgtgacatccgtctcaaaacctccgcttgattccaccctgccctggtcatcggtcttctgaagaatgttctggtttcccaccagtgaatccccgtcctccaccttgtgaatttccattctggaaggatagtcctccacctttatccggctgaccgtcctggtacggactttattggtgttgccggccaccggaatggcgtactggtatctcacagctgtttcctcttcccacccatccgtggttccgtccgcgtttcttctttccctgtaaaatgatacgttgtccgcatatacttcaaaggccaccggacggctcttcccgtatcccttcggggcctgaatctctaccagcacatagacacctgcccccaatggtttatacgtctctatgtatcccacgggtacctttttcacctgaccgtcaacgaccagttccctgatggtggagtatgccctgaaaactcctgtcccatttccctcctggtcttcctgcctaatcagctggctttcgtcatactggggaatcccatccttatccaggcgcacaggcaggtcgtccgtgctcccattgttcttacccactctcggatacaggatccttcttccgtctgcatcttccacaggatttccctgccagtccaccgcctcgccgtacagcacatttccggaccctgtcacggtgcccattccctctttttccacctctctcttggccgcatatattttaaacaatgcaccgtcatgaataatggaatcacctgtctcggaatccagtttctcaatatggagtctggaattaaaatacgcatcctcaaaatcctcctgggcaaatgccacgaaattaaaatcccggccatttccggagggaatcagcgtctccacatttcctgtgtccgggttaattctgtccaccgcagggggaagcacggtccacggaaccagcatagaggcaaatttgccgtcaacagcggtctgcatccctttcatcgttgccacctggtccctgacctcccactgtccgtcctctgtttcgtagccgtcgtagattaccccgtccattattccggcatcctcgctctgggaggtatatccggcataatatccctttacagtatcatttctgccatccatgtactcttcttcatagggagcctgggacgtcaggctgcggcccggccgcatatccttgtccagaccatatttatatatctcaaatttcccatcctgtccattggcctgtatgatgtgggtctcctcattaaaccgtatcttatatttacgaatcaggtcatccggtgtgtctgtgctgtcataccggaaataaggactgcctgtctgatagttgacatctgtttcccctgtgccttcatcctggccgatatccggcacaaagggaagggttatttccctgggatagtccctggtaaaatgccggttagccagctcccggtccacatccgcaggaacctgttccacaataacgtatgtgccgtaggcaagcatgatggaatgattgaaataatcgtccttcccattcctggtattgcattgcagcgtggtcacatcaccatccgcccctccgcctgcatcgctgtcccaggcaatagccagcctgttatccagtccggaaaaaacagacagatagctcccggcctcctccgcagcccgaaaaagggccttttcgtaggctgtatcgctgttaagcccaggttccgccgtaagaatttccgctttataggcatctatatcatagtagtccacagcaaactgctgtattgcctcctgcggctttttccctttttccacctgcactgccgcgtacatggcatcaaagaatttcgtgtagtcatagcttccgtcctcttttgtttccaacagccgctgtccgcttccatccctgggaggaagaaaaattttctggacatctcctttgaaatccgctgtccctatatcttctgaaatgatattgccggcactgtccacaaagatattttccaggttacttttcagatatgccttgaatttaaactgattcagcagttttgcgccctgggaactgccgcctccgttaaacaatcccagcagcacggtcatcgggtcattgtgaacagatccgtacgtatttactccgtcataggatgactgggaaatatcttttgtgacctttacggactgctttataactctctgcaatacctgcagcggactggaaccagtgcccgcttcctgtaccggctgattctgccccggataattcaatgcctggaatacaacatagcttccttcatccaacggaggaaccgcagccaaggcgcttaccccggctcctgctatgtctgtcagatactggctgtaaggcaattcctccccttcccaatcaatggtcttctctcttgtcactacccggaattccgtatattccggctccgtcctgtcctcccagtctatggtattctccacatgaaccgcatagtttcccgtggcccaatcatagacagcagaaaccggctcaggcttatccgtttcgtatgtctctgtcctgtcctcatactcatagacccgctccatgagaggaatgggatttccctctctgtcaaggacaatatccccttcgctgtaagtctcatacagcggctgatatacggtttcggccgcagcttctatatcactcccaaaaggaataacctggtttatttcccttttttcttttattgatgcaacgctgcttttcaggctgtattcacccttttgatactcaatccagtaaccaaccttcccggcaggcccccctgacacctctgctgtctttcggacatacagcttacggttcacaaaatcataaaccgcagggaagccggcatggcccaatgaataatcgtgacgaagcaaggcaaaaaagctgccctccatctcatatatatcctccacatacccgcagtcaaagaagttatggactgtgtaccaatccatgatttcctctgcggcctgagcattggtctgacccgaaagccggattttggtccatggcgaaatgtctgtaaccggtctgtatccaagctgtcccaacatgccgttaacctgttctgacagataatgaggttcaatggcctgcccccatttactcatatcagccggtacagccgtaccgctgggatatggggctgttcggaagcggtagggcagagtctccccatagggagtccgctcccccgtgtcactgtccgtagcagtatccggccggataatgggattaccgtcagcccctatcttatactcccctccttttgccgtctgatagacaggactgccctgctgatctacttttggctgaagagaactgcccaaaaccgccttgtacgtctttgtctctgtcccggtccttatttcataaaattccgctccctgtggatatccggtcaggatgatatcatatccattttcagtcttatagttctccactataaaatcattccaggaaccgtctgcatccatggaattataatcggacaaaccgcctgatatgcgggcctgcccggcctcatggatccggtttactatatcctgggtccggttgctctcctttaaggaaatcccgttgacagataactcatacccctctgacctgctaagctccatcacataataactgcccataataaggggccgcccaatccactggtcttcattggaaagcacataatcaggataaacaactgtaccaaatccttgggccgaggaggtgacagaggaaccattatatagattctcaggtccggtggcgttctccggtgagattatagttccatcatcactcagccgggtgcctggtttctccgtgtacgccaggaaagaggcatttccctgtttatccgtggcggctacggctgtcaaatcattctgattataaatagtgccggattttccatccgggtgaatgatatcctgggccgcaaacagtccatagacagcgccctccagcgtggcatccccctgggtcagtccataacttttatccccgtccgcgcggtacagctccaaatctcttttattgatatgcagcctgccctctgtccgatggtcccacaccttaaaggtgtaaagaatcctatccggttccccataagccgatacatccaaggctcccagatcatcgtccataaatgacggcagggatactgatatggtgtcgtcgtcatcctcttctccggaaaacagggatctgataaaccgcactgcacggttttcttcctcttcaggttcttcatctccgttcccagtgtctgcctggaaatacgcagctatgccaaaggacggtgaaataggatttctggcatattcatattcttcataaattgggctttgaccgccatcctcctcatccccatcacgttgactggtgccgtcctgattttctatatgagaattcccttcagcttcatcccggatatccgcagtttctgtggtgctgtcttgtatctcatgcttttccttgtctgtggtgttttccgtggtgttgtctgtactgttttctgagctgatttctatattgatttctgtgtctgcgtctgctttaccatttgtgtcttcatttgtttcttcatttatttctttttttgtatcttcatctgtttcatactttaaattttcatttgctgtatcttctggtttgttttgggattgatgtttgggattaactgtgtgttcttctgatgaaatgccggaaaatagaatggtttttccatggcttgattttaatagaataggggatgcggacaccgaatatgattggacctgaaggtttccacttttctgttcttccttcttttggctcccattgtcttgatcctccctatatgaagtttcatttttctgacggctttctcctgttttttcacttatggaatcgtcgcttttggggcctccgctcccggtgttctttggccctgttccttcacttccggtgttcctggcctctggccctgcgcctgcattcccggtgttctctggtcccgttccttcactcccggagttaccggcctctggccctgcaccttcattcccggtgctctctggtcccgttccttcactcccggaattccctgtctctgcccctgcgtctccactcccggtgctctctggccccgttcctccacttccggagttcccggtctccggctctgcgcctccactcccagagttctctgtctctgtttctcccccttcggagtttcctgtttctggccctgcgcctccacttgcggagttcccggtctctgttcctccgctttcctcatcctctttgttgccatcctccggatttttttccgtcagctctccatctttctcctcctcaccttccggatttccattgccgtcctcatcttgtcctccgtctccggatgtatcgtcttcctctccctgtgttccatctccagcctcctgatctcccgcactgccggaagtattttcctggtccccgaaaatgccgccggcagctgctccgtccgcaggaatcgccggtttctttttttccttctcatctccccataaactgaatatgctgcgctgttccccaagctccatctcctgggcatccggaaccggatatttgtaagctcttctttccctcattgccgccacgtaagtgtacacaggctccactgcctttcccacaaaagagcctggcctgtatacagctggccgcgcgcttcctcccgcctgggcggctgacagtacaaccgtttctatctccttgtcatcgttgtgcagtccatggagaatatatcctgtccgggctgtcttttcctgtaaatggtaactgtattccaattctataaaccgttcatacgtctcatcccgatccgccagcatggcttccatagccgaagtgtcctgttcgcggttgtcctcatcattgttcggggcatggaaatcacaagtggctgcacacaattcctgttctgccctccactgtccgcgaagccggtcattttcttcgtcacagctgcaatcctcatcctcctcatggtcgcactcaatccattccggtgcaggatggcccatacagtatgttttgctgtaattataatatctggtatcgctatgccttgcatatccatccgaatccgtggtcaatatatcacagatataatcgttttccggttccggcgacatgcagtttaagtagacctgtccgctggtcccatccggttcaccttcctcatatccctgttcatttacctgagaaaaatcaaaatcctcccacacgttgaacaccgttccctccaacggttgattcgtctcagcacaatatttctccaaatcaatgttgtaattgctctgaaatgtttcagaatggcggtataattccaaatcactgctgcctggcagaaccgcatctgttccaaccgaaaaggagacagatgccatgggccggttaaaatccagccatcccaactgcttttgaaggttttcagatgcagcaggggtaaaaatataagcataaaaacggttttcgatgccctggatctgcgcggacacaattgttccctggggctcctggtttccattgtactggaatgtcacacttctgccatccggcgcaagtttatatgaccactgattatccggaaaggaccaggaagtgtcctggagctgcggacagctgctgatatccaatgtaagctcataatgcccgtctttcaaagtcattttttggacagaaccagtccacgcaggaagggaagaactgcccgtcccattaaactgggcttccccctccagtatgtgggccttcatttcctcataatagaccataaccatgggatccccatccattactgcctggaatttttccatggcctgcttctgcaatgcccagttatgttcatatccattcatgcatccccagtaatatacctggactaccccgtagcgcgccggaacataatagttgtccgataccagccattcataggcaagtaccatggacagataacgttcaaatggcccgatgacaggaaccggcttccccggctccacataatattgctcgtatttagccggacttccgtccggcagtttgtggccttcctgtatacataatgcaggcagcgccccagccccttcacccacctggtaaatgttcatatcccggtgtgtccttccgaatgcattcagattcttcccccggaacacctggcggtatggatttaaattaatcaaatcaccggctccgctggtggtccgtattgctgtacataccaatactgttgcaaggaacaatgccatcatgcgtttcagtgtcttcattatcctcattttttctcctccggtaaaaactttatactacacgcctttgacgaatatctgcgaaatatagatatatccgccgctctcacagacacctgctcctgtctccgtccatctgtcatccagcatttgcttcttatgactctccgaatccatccatttttcgaccgccgcctctgtaatcatttccatactgtccctggaatacagctttgccaggttttctgcggaggaataacgtttcacggttattgccgtatcaaacttacttttatcgggacgcgtgtgactgtaatatatacatgcctcctctgccctggtagcagcattttccattaattcctgattaacagataatacgtttccccctcttttctgtctctcggcattgactaattcaataatacggtatgctgattcatctgttgaaatatcttttgttgaggttgagttagttctctgatgttccggttcttctccgtcccatgttctgtttttaccatttatccggtttgccatatccgtaaactgtatgtactctgtttccgacatatttatctgccatgttctgttatctgctccggccatctcctccctctggatcaccccatccattatccaggctccttcttcatttacctgctgtccatccggcgccgtggtatctgaaatcatgtatccgtccgggccaaaataataatgttccgccattccgtcctgattgccgtccagccactgccagcagttctcaggatagcttccattgtcattcttccaccgccacccattgccatcctgcaaccactgaccggcataaaccggcattgctgccatgattgataacaggactgacaggacgggtactgtggtactctgtctcaattttcggttgatatcaattctcttggtggttttctttttaactgttttcttttcgattgtttctctgaccattatgttacttccccctatatccctttctgcaatttttcttcctgctatatcactcttcgttatatcactctccgctatttcactccccgctatttcacttccccctatttcactcccgttatttcactccccgctatttcaccctctgctatttcactccccactatttcactccctgctatttcactccccgttatttcactccccgctatttcaccccctgctatttcactccacgctatttcactccccgctatttctcctccaattattttcccccagtcttttccccatctcttaattccctatcgtcatggcctgtcctgtcatctttttttcagcctattctttttcagccctttcactttcatcttttcctctccggtcatttttttccaggccacatctctttcagctatcctgctctcctcctcccacaaaatcccattttcttactcacacctacattttccttcacataaaacagcactaaacatttttcctctccctaatccatctgaaattccatctcccattttcatcatcctccctgcaatccacaccgcccccgcaataacagcaaaccgagcctcacaatacataaatgcggatccgtcccccatttttcatcagcagatatttccatccgcgcccggttattaaccaacgcacagccaaatcttataaagccccttggtttgacctcatatcagctggaataccggtttttctccgcccgctgctgctgttaagtttatttctggcggttctcccccgtcaccatccgcatacaccacctgtaaaggcaggggaattttcaccttttttagctaaaatgaagtttcaaggcgcgcaaaataatatgattcaattttcaagtacaaacaatccctctgatttttcaagaatattgattaacgaacacaactgactactgataaacagtactgattttaagaaacttacagatataatccaaacacaccgctgcatactgaataaggcaataaaacacgcatcaccaccttttttaatcatccctacgtgaaaaacggctgaaccagccaaacgatcatgaaactgctaataagaatcctgcacagagacttccgtgcgattttatatagaatatcatatatacccttaaagcgtcaatacccaactcatttttatttctctccacaactcgtttttatttctctccgcagaattatttctcttctgttttcgcgggagaaaagtaaaatccgttgtcttccactcctgctaccgctgccatcaccacactccaccaacaatgccaccccacacaaaaaaaaaacagccaacccgccccaacaccacacataccaaactctataaaccacacacaccatcgcccaatccaccactacaaaaaaccggcatccaggctcttctgtccacaacagacatcccccggataccggctttctatatttcagataccatatttacctacttatttccattaaggtattcatcaattcctcttgcacctgcgcggcctgcctccatggcaaggattacggtagcagcgcctgttacggcatcgccgcctgcatatacgccttccttggtggtcttaccgttgctctcatctgcaatgatacatttccacttgttggtctcaaggccttctgtggtggaagaaatcagcgggtttggagaggttccaagggacatgatgacagcgtccacatcaatggtgtaatccgatccggcaacctctaccggtctgcggcggcctgatgcatccggctcgcccaattccatcttgcgcactaccattcccttaacccagccgttgtcgtcggtcagaatctctaccggattggtcagcagattgaagataattccctcttcttttgcatgatgtacttcctccacacgggcaggcagctcagcttcgcttcttctgtacaccacatgcacctctgcgcccagacggagtgctgttctggcagcatccatggcaacgtttccgccgcctacaactgctaccttcttgcccaggtagattggcgtatcgtaatcatcacggaaggccttcatcaggttgcttctggtcagatactcgttggcagagaatacaccgttggcgttctcacctggaattcccatgaacttgggaagtcctgcgccggaaccgatgaatacggccttaaagccttcctcatccatcagctcgtctatggtcacggatttaccgatgataacattggtctcaatcttaacgcccagtttccttacgttgtcgatttcaggctgtaccacgccggactttggaagacggaattcaggaattccatatgtaagcacgccgcctggctcatgaagggcttcaaaaatagttacttcatatcccatctttgcaaggtcgcctgcgcaggtaagtcctgcagggccggaaccgattacagctaccttgatgccgttggttttctctggcttagccggtacgaatccattttccctggaccagtctgccacgaaacgctccagctttccgatggaaataggctcgcctttgatgccgcggatacatttgccttcgcactggctctcctgagggcatacacgtccgcatactgcgggaagggcgctggattctgctatggtatttgctgcatcctcaaattttccttcttttacttctgcaatgaactttggtatattgatggcaaccgggcatccctggatacattttgcattcttacagttaatgcagcgggaagcttcttcctgggcttcttcctggttatatcccagacatacttccttaaaattcgttgccctctcctttgggtcctgttcccttacgggtatcttctttaatacgtccattattcctcacctccgcagtttccgcatccgccgtgatgggtagcaccctcacgcagccttaagatggctctgccctcttctgtcttgtacatctgctggcgcttcatggcctggtcgaaatctaccagatggccgtcaaactcaggtccgtccacacatgcgaacttcacttccccgccaacgcttacacggcaggcgccgcacattcctgtgccgtccaccatgattgggttcatgctgacgatggttgggattcccagctccttggtgagcttgcagacaaatttcatcataatcataggtccgatggcaacacagacatcgtacttcttgccctggttctccaccaaatccttgacaacatcggttaccatgcccttgcgcacataggaaccgtcatctgtggtaatgtagaggtttcctgcaacagatctcatttcctcttccaaaatcagcatgtccttggtcttggcgccttccaccacatccacgtcaatgccgcgctctttcagccattttacctgtgggtaaacaggcgcgcttcccacgccgccggctacaaagagataacgtctcttctttacttcctccaggtcatccttcacgaattcggaaggctgtcccaggggacctacgaaatctgcgaagctgtctccggccttcagtccggccatacgctctgtggatgctcccacaatctggaacacgatggttaccaggcccttctcacggtcgtagtcacagatggttaacgggattctctctcctacttcgtccatcttgacaattacaaattcgcctggttgacaggccctggctatacgcggtgcttccacgtccatcagatatatcttatctgccaggcattctgattttacaatcttatacatggttctcctcctagtaatatatactcgcgtcctcagctggatttcgccgcgcatccggacgtgacattcattgttattccacccggatctggtagctcttctgccagttttcccatccgggcaacgatatgattccccttctgtccttcaattcccccttatatccatctgatgcgcagataccgtaccatggttccagacatacaaagggatgggtggcctccattgtccatattcccaaatatgggaaatcgctgcattccaacgtcacatagggccttccatccaccatcaggctcacgctgctgacctgtgcttcatcaaacatatatgtaagagctgtatcgaaaaatccttttgtcagcagcacccggccctctgacagcttcaaatttccctgaagttcttccttctcatagccgtttgcattaggcgcaagataatggagacaatccgtaaactgtccctccctgcaccctctccggttaaattcaaaggtgaaatcgtatatgtttttcccttccggcacctgaaaagcaggatgtccgcccatcatgaacagcatctcgcctgaatccctattggcaaccttccacataacctcgatggttctgccttccagcctgtgaccaatctctacctcgaaatggaacggatacttttcatatgtctccggcgtgtccttcaaacggaaccagcattcgtccatatcgcatagaaggggttcaaaatccatatcccttgcaaagccgtggggcgtcatgccgtattctttcccatcatggacatacgctccctcataacattttcccacaaacggaaaaagcacaggggcgtgtctgttccacacagacggttcagcgcaccaaagcacttcacggtccgctttcttgtcataaatcctggtaagttctgcaccgcggcgggcaacagtaactagaagctcatcattttcaagtgtaaataatgttccatcctgtttcactatatattcccccgttctcctgttttttaagaagcttgtgagaatttaccctcgcacaagctttatattaacattttctgcttcatgttacaaccggtttttaaattttttcaaaaattattttctttttttcagcgtgttgaacaatttttttattacttttttctccggaacctccggaaggtataacagaggtcaaaataggtctgttcgtccccctcttccgccagataccatccctcttcctcttccaaatcaggaaagtatgcatccccgtcataggtataatcaatactggtcacatgggccgttgtgcaatagggaaggaactgccggtaaatgctctcccctcctatgatatagatatcatcttcatcgtaatccttaagcgccttaagcgcctcctccaggctgtggcagaccactgcgccctttaccttatactgcatatcatgggtcaggacaatatttacccggtttccaaagggctgtcctcccggcagtccctccagggtcctgcgccccatgaccaccaccttgccggccgtctccttaagaaacatctgccggtcggccggaatcgtcaccagtggcctgccatccttgccgatggcccaatgcctgtccgctgtcacgcaaagattcaatattccctcaccttacccttctgtatattctgaattcaaaggaaatgccctcatgctccctgccatcgctgaccgactccagtttccagttttcatcctgatccagattttcaaaatccgtgtccacatcaaaggtcctgtggatgtaggtcacatatgccttattgcagtagggaagaaactccctgtatatcatgcctccgccgatgatgaacacatcatcctcattacagtcctttaatgcctccagcacatcctccgccctatggtacacctgcacgccctcaggagaatacgcttcatttctggacaaaaccatatttacgcggttcttcaggggctttccaccgggaaagctctccagggtcctgcgtcccatgaccacggtcctgccactggtggtctctctgaaatacttcatatcctcagggagatgcgcaaggagaccgccgtccttacctattccccatttctcatccactgcaacaatcagattcatgtgtgaatacctcccattttcttccaggtatctgtttatccctgtcccgatcaccggtcttgaccgattatatcatgaaaccctttgaaagaaaaggtgtcctctgttataatgattccatatttaaaatggaggacaatgaacatgagctacgcagaccagatattcatacagaactgcaacgatatattggaacacggcgtctgggatacagactatgacgtgcgtccggtatgggaggacggcaccccggcccacaccatcaagcgcttcggcatcgtgaaccgctacgatcttaccagagaatttcccgtcatcaccctgcggcgcactgcctttaagtcggcagtggacgagcttctgtggatatggcagaaaaaatccaacaatatccatgacctgaacagccacatctgggattcatgggcagatgaaaacggcagcataggcaaggcctacggctaccagctgggtgtaaagcaccattataaggaaggggattttgaccaggtagaccgcatcctgtatgacctgaagcacaatcccttaagccgccggatcatgtccaatatctacaaccaccatgatctatgcgagatgaacctctatccctgcgcctacagcatgaccttcaatgtctccggtaataccctgaacggtatcttaaaccagcgctcccaggacatgctgacagccaacagctggaacgtatgccagtacgcggtcctgctccacatgctggcgcaggtaagcggcctgaaacccggcgaattggtccatgttattgcagacgcccatatctacgaccggcatataccgatggtggaggagttgctgaaacgggagccttacccaggtccaaccctgtccatggacacttccatccagaatttctatcagttcaccactgacagcttccggctggaagattatcagtatcacacctttagcgggaagattcctgtggctatataggcaggaaataagaaaagacggatgaccattcccacggtccatccgtctttccttatttccatctgcctctccccagcgcagctgacaccgcatctttcttaaaacaacccctcattcttctgctccagcaccttaattccatggtagaacatttcattataaggcgtaggtactcccagctcacggcccatacggatgatggtgcctccgaacatttccacctcggtcttgcggcctgcctcaatgtcctggagggtggacggtttatttttaggaggcacatccttaagcacactggcctgtttttccatatccctttccgagaggtcgattcctttcttttgcgcaatggctatgacctcccgcatcagcttctcacggataaaattggcatctgcgctgacgctccaggccccaaaggggatgcccaggacagcggcgctctggttctcactgacattacacatgtatttataccagatggcccgctccatatcctccggaacaacggtacgtatgcccgccccctcaaacagctccttcacagcctgtaccctgggggacactgtctcattgtgcttctcccccatttcaatccgggcagcctttggattaaaggaggcgcacccgtccttcatgaccacgcttacctttgccagggaatacagcagattatcccatccaaataccgctgccaccttttcctctgcctccaccccgtttaacggggccatgataagggtatccggtccaatctggtttctcatgtcctccaaagcctgggacagggcaggaaacttggtgatgataatagctaaatccggataatcctgaccgcaggtttcctccggagatacgatgttgaaatggtggcggaccccattgaccatgacgccttcctgttccagacgttcacggcggctgccccctgcaatcacacgcagattatcttccatcagaggccccagatgactggccaggaaacagccaatggctcccagtccaatgagggatacggttcttatttctcttttctgattcatcctgattccttctttcatacgtttatactcatctgaagcgcaagggaataaataatgcgctcttttacatgtttctcagtcagctgggtcaatgcgcgctcataatagtccagctggactctgtagcgctctgccagcatctttgccccttgttccggacttccctccggcacatggtctgttttatagtcaataaggaccagtccgtcctcttcctccagataggcgtcgatgattccctggataagtaccagctcgtcggaatcaccaaggcccatttccctggcaggtatgcctatgataaactgctgctccttatggatgcgtccctctgcctgtgctttcgccatacgcgtccccaaggaactggacaggaaattccatatgacattgggattaataaagtcacgggcttcctggtccagaaatccgttctccagaagctcatccaccaccggctttacctctgacaggctgtgtatctcatggaaccggatatgctccagaaccgcgtggtatgcggttccccgcagagctccgcggtttgggccggatgcagatggtttattctgttctcctgattccctgaatccggagcctgccacatcctgttttcccctcagcgccgtcagctcaccaagggctgccccctccagattgtcacggtccgtgccaatggcatcctctgcccgtcctatctggctctgttttttgagctcggatacagacaccatagcgtacagtccggtatctgattcataagggtattcatattccaggacttttctgagatgtgttccaaatgctgcatcatacaccctctccccatccaggttcagaaggtcttcctttttcatcttccgtatgatttgccgggtaatttcctcgccaatcagatcttttacctgaatctggcgcatttccatgtgggcggcaggaatagcgggctgggccataaggagccagtccaggcaggaattggctgaagccagtatggtatagggcagctggccctgggacaggggaatgtccttccattttcccagcttattctccagtgacttatccgcggctgtcataatcagcttttccttggccctggtcatggccacataaaggaccctgagctcctcccccattgtttccagctccatccggcgcttcaatgcctgctttttaagagtcggcgccttgacccgcagctccaggtccaggaaatctgccgcagcccctaaatccgcatccagaagaatctgtccgtacgcatcctgcttgttaaaccgctttcccaggccagccagaaataccactgggaattccagacctttgctcttgtgaatactcatgatgcgcaccgtattgtcctgctcaccggccacgctggcctcaccgaaatccgtatcaaatttcttcagtttttcaatgtaccttacaaaatgaaacagacccttgtagctggtggattcataggcagctgccttttccaccagcatgtccaggttggcccgtctcgtctccccggccggcatggcggatacatagtcgtaatatccgctctccctgtatacccggtacagcagctcatggatgggcagatgccttgcctccccccgcagccgttccataaggagtgacagcttaagggatttaagggaaatggaatgggctgcctctgccggtatgctgcataatcccactgtgattaagccttcttccctgtcaggattttcctccggccccggcccttttcccggccccagaccttcctcctgctccggttcttcctccggccccggcccttcctccagccagagcctccatgccccgtatacgccccggtcctggccctttttggaattccgcttgtaggcggccatcatccaggccatctcctcatcatccatccccacaatgggcgagcgcataacggctgccagcggaatatcctgcatgggattatcaacaacagacagaaggctgagaaccgtctccacctcaaccgtgttgaaatatcctgtcctggtctgggcaaaagccgggatgccttcattcatcagcacatttacaaatacctccgaccatcccgtcatgcttctgagcaggataaccacgtcgccgtaacgggccctgcggtaagctcccctggatttgtcccacaccaaaatcccctggccttggcttaccagctggcgtatccttccggcaatcagtctggcttccagctcttttgccgtataatcaagggagtcttcatccagctgcttcagtgcttccgcacccgtatccaccatgagaagctccgtaggcgttcctgcaaggaaggaaacagggccggattcctgcgtgtcagactccccctcttccagtcccgggccacaaaccgttttcctgttcacttcctcaaataccgctccgggataaagggctgtctcaggcgtgtatgtgattcctcccagattctttgtcatgatttgataaaacacatcattgacactggtcagcacagactccctgctccggaagttctgctgtaattcaatcatttggtacggtccgccctgcctggaatatttttcatatttatccataaaaagctccggcctggccagacggaacctgtatatgctctgcttcacatcccccaccataaatacgttgggataaccgaaccgctccctggaaatgctggtgatcaatgcttcctggacataattgctgtcctggtattcgtccaccaatatctcctcatactgccggctgagctcgtctgccacctgggacggatgacgggaaaccctttcttccccgtttccggtttcctcccgcacatacagaacctccagcgccagatgctccaaatcattaaaatccagcacgttccgctcccgcttggcatccctgtatgcctggtcgaacatgcctgtaagccttaagagctcccggatgacccttctggtccctctcatgctttccacgacttcctgcggactctgctggccgtagagctccctgcattttgccacggccttcttgacccggtccctgcatgcgcttacaaatgccttcttatcaccgtcaatatccttgctccggatggatgccagccggtcgaagctcatgttctgcaggctgttatacagggcttcaaagctgcctgtggaagcggcccttcctatagcctcgattttacctctgtcgcttatgagcatgggctcgtatgccagggggccgttttcctccaggcacacattaagggcttcccccagctgcccggaaagctctgccatctgtctggccacatcctccatcaggaacaccatccaggggctttcctccatttccccgatgctctcctcctccagctccttctgacaggctgcaagccattcctgcggccatggatggctctgagaaaactgccatgcctggagaatcacatcctcaattcccctgtctgactttccccgtccgaaatgctccacgaaccttccaaactcctcatccgcctcatcgtaacagttttccagcatttcccccatgcagtccccccgcagaagggacagctccccctcatccccgatacggaaggccggatctatgtccaggctgttataatggctgcggatgatattcaggcagaagctgtcaatggtggtaatctgggcctgggggatcagggctgcctggagccatagatgctcatcctcaggacgttccttcagcttctgctccactgcggcgcctatcctctcccgcatctcagccgcagctgcattggtaaacgtcattaccagcagctggtcaatatccagtgggcggtctccttcgcttatcatctggatgatacgttccaccagcacggccgtcttaccgctgcccgctgccgcggacaccagaaggttcctgtttctgctgtctataacctcttgctgtttactggtccaattcactgccatctgtttcctcgtctccttcagattccaattccgcccagatttcctcaggcttaagtcccttgagcttgcggtatccatagcctgctgtcttggtatcgaacccgcacactgcatggtaggggcaatagtcgcaggctgtcctgtttccctgtttgtaaggctttaagtccacatttcccatcagtatatcctgccccgcttccctgagcctccggttcacaaaccggcgcagatcctgaaaacgtctggtgctggccacggacgagcggctttcctggacatagccatccttaatcgctacgggtatcacatcggattccttctctatctcccggtccagatgccggataatatccagttcactgtttaccagaccgttcatcctgagctgctttaatatctgtttttcgatatccctttcatccattcctttctgcttatccgctatcgggtcacctatgtggtagtagaagataccggcaggaaccacctccttgtccggatgtctcctctcctccatctccaccgccgcatccatatagaccaccagctgaagctgcaatccataaaacagggcagccaggtcaaaggatgtggttcctgacttataatcaataatctttacatagacatggtcctcatccctgcacaggtccatgcggtcaatacgtccgcgaagctgcagctcttcatcctctgacagaccgatgcgcatggccttcaggttatcaatggctgaaaaggacacctcgaatcccaccggctcaaagtccccctttttcacctgctctgccagagcccatatggtgcggtccgtaatccgttccaccctgcctgccagatacgcgttgcgggctgagctggacatgattgtgttgccgtattcctccgttacctgggtcacgcattcctttacaaggctctttctcccctcttcggtcagctcccgccaatcctgccctctgtccttcatggaggcaaagcatctgtcgatggactggtggaacaggttgcccatgtccactgcctccagctcgtactcctgccgctccatcagttccagaccataccgcaggaaatgggcgtaggcacaggaggcgaactgctccagccgggttacgctgccctgcagttccctgccgtaaagggctctggcagctgcccgtccgattcccctttcctcataggaataaaaagcagcgtccaccagctgcctcaccttatcccggtgctcctgcgatgtataaaaatgctggaagagctgcataaaggcagcgtcctcccgctccctgtcatcctccccctgttcctgcattccccgaagcccctgtataagcagctccctggcatccctcccggtccgcactggccattccacggaatgctcgtccagggttttcattccgggaaacagctttcccacttctcccataagattggagggtctctggctcttgccgtccggcgtaagtccggcataggtgagcaccagctgtcgggagggctttgacatcataagatacagataaaatttctggatgcagccatcctcctttaccgtgggagccagctctatatccattttcctgagagccgccctgtcacggtccgataaaaggcttcccccgttctttctctggggcaccgttccctcgtttactcctacgaaaaacagtaccttcactgcttccagacggcttcgggtgatatcacccaccataacctggtcaaccgtggccggaatcacacccacctggatttcctggaaaccggcatccagaatctggatatagttcttcatatccgctttttccgcgcccaaaagcccttccagccgctcaaacagttccagtacgcggtcatagacctggccgtattccctggccaggttctcatcccccggctcttttcgctccagaaagaaatccctgtactcctccagcttttccctcagctccatgtgctccaggaactggcgaagagctgccgtcacagaggcaatggtggctccctctgccttaaatgcctcccgcagaggccgcagaggctccagtatccacatgcggtattggttcagctccttcaggttcagcttttcaccgcctctgtactgccgttcccaacaggaatcccagcgcttccacccccggatgcccagggcccgcacataattttccagccggtccgtcatctgctctgcatgttccctggaaccgtcgaatccgctcccagcatctgcctcctctgcatccccggacgtatctgccgctgtatctgccgccgctctctcctctgtatctgccgacgcccactcctttgtatctgccgacgccctctcctctgtatctgccgacgccctctcctctgtactcccagccttatcatacaccagtcctgttttcagataccggaacgcgctctcataagagaaatccttcaccatctctaacgctgcccgtatcagctccaccatgggattttccagaatactcttcttatcatccaggaaatagggaatcccggcctcatcaaactggtgggccagctcccgtccataggatggaaggtccccggtaatgacggcggcatcccggtaacgcatcccttcctcctttatcatctgctcaatcctgctgcacacgtaagcagcctcccctgccgggttgcgtcccttgtacacctggatgcgctcttcctttccctcccaggtcctgccggagtaccggtacaggttctgttccagaaaatccagctccgggctctcatcaaatctccaggccggacgccggctgcagattatgtcctccttcttcgggattccatgctgctttgccatggaggccacacggcacaccgtatgacggctcatataaaacagatgctggatactgctctccttgtaggcgttttccctggaatcaatggtaaccgtacataccacctccctggcgtgcatcaggaacagctccaccagcctgtactggaccggagtaaagccggtatatccgtccagaagaatgatgctgtctttgaggggttcccactttggaagctccctgcacaggatgtccagaatctcctcagccgtgatatagtggctctctatatactccctgaaaccgctgtaaatcacctccaggtcctcaagcttctgggccagaagaggagaatccgcctccccccgcacgtccctcagcatatccggtgtgataccgtactggtacagctccgagatctgggacttaagctggccgatgaagccggtctgctccagatgcccactgtagagggacagctttcctctctttaacccggccaccttgcgcagcaccatggattttcccatatcatccagcacaaccgggattctgacccccaggtcctcgaatacccggtaagccagacgcttaaagctgaggatatctatattcataatcccgtgtctgggatggagacggatgatttccttctgtgtctgcatggtaaactgctccggcaccactaccaggtacttttgttccggatgctccatggactcctttatgacccggtcatagagcattctggtctttcctgagcctgctcctcccaatataaactgcaacgccacttttctctctccttccggcagacgggacaacgaaaacttctcatatttccccgccctgcaacataagctttaacaaactatcttagaggtcctgactatgagctctaaaaccaaaattgtggtactaaggatgaaggaaatcatctacaccgcaatcttcgtaggccttgccatccttttaattaccctctgtttcatcatgttccggcctgggaaggacaacgtttccgtttccgctgaacctgccggctacctgccgggcgtatacagcgcggcactgacccttggcagcgaagatgtgaatgtaaaggtaactgtggataagaaccgcatcacctccattgacctggttcccttaagcgaggctgtcaccaccatgtacccgctgatgcagcccaccctggatgatctggccagccagattataagcaatcagtccacggagaaccttacatatcccagcacctcccgctatacctccactgccctcctgaatgccattaacacggcgctggacaaagcaaaagtggattgataaaaagcgggcagatgtttcccaaagcactccggtacgtctaaaagctcctgccccttgtcatgaaggcgggggcttttccgacgtaccaaatgtaaaaaaacggcagattgctctaccgtcttatcctacaaaagaatatgttttatcgtaccatgattcccgacccgtgtcaagttggcaaacccaagacctgaacctacacaacccccaagacctgaagcagcagtttccgccgcctcaggccttcattctatcacagttttggtatcaggatcccaccttttccatgaatcccatgtagttcatctggagccggaatatatcgttggctgtcagcccctccagggctccctccatgaagtagcgttccccggccatatccaccttatcccgcctgacatcgccgccggcaataaaggtgggtacgccatccccgctgtgatcccccaccttacagggtgtggaatggtctgccgtaaaggaaatatagcattgttccaaatccagctcattaagaagatagcccagcatttggtctgtctgttccacaatctccttcttcttatccggacggttgtcgtggcccgccagatccgtgcccttgatatggagtaccacccagtcgtatttcttttcctttagaagctctgccgccagcctggcctttcccataaggtctgtgtcaaagcttcctgtaaagctgtccctgatatagtaatccatacctgccagccgggcaatgcctcccactgttttatctcctgccacacaggcggccctgattttgtacctgtccttcagggaaaccatctccgtcttctgtccggctcccctggtcaggatgatattggccggcttaagccctttttggatcctctccttattaatgggatgctcctttaagatgccgtatgctttttttgtgaattcccacagggcatctgctgtcttctgcgccttttcactgccgtccaaagccctgggtcctgataccttcttcccctcctccgtggtaccgggatccgtacagctgatagcatcgcttaatccctctcctctgagaaccactgcaatccggtgctccgtcagttcctttgccagcacccgggtcccgtcagacagcaccatgccgtttacggcctgtgccagaaactccgtaccctggctgattcgcccggccctgcggtccaccaccgccatatcctctgtaacggttgcaaaattccctctgaacgccacgtccccgtccatcagctccagcccgccgctgctggcctctaagggtcccctgcctctgtacacccttctgctgtcatagccgaatatctgcagatggcccacatccgtgcccacgggaatccccggcgcaatggggtatacatttccgcacatacccatttgaagcagacgctccatattaggggtggaggcgctctcaagcggcgtcattccccccagcaccggatccggtctgtctcccaggccgtccatgatgattaataatccctgtctctttctcattatgagttgcctcccatcttctttttcgcagccagttcctttgcctccttcagcatccccttatttttatacaggaaataagctgaaatcagaatcgtggctccccacatggacagcgccagattgcctcctgctttctttatattcaccgtcatctcacattcccggccaacgggaacctccccaaacacataggcgccgtacttcacgccctggtccgtaaatatgccatactcctcctcggggtcgtatcccacgattcccgccagttcatatccctctggcaccgccagttccaggctgtagaaaccgattgaaaccggtgccgtgtttaccatggaatatgtaactgccttcagattgcccggggctgtgccgcttgtcttggccgccttcatcttgtaagtcccttcctggtgccagttcagggtaagttccaccgggaaatccgcctcatcaaaatccgctaccagataagatgtcatgcctgaatgctgctccttcggttcacccttaagggtacctgcccctgcctggacagacaccagctctgcatcctggtacattggtactgccagacgtccctggctgtcggtcatgccttttatatgggagataacagctgcatcctccccctccggcgccaacctgtccgccatctctatcatggttcccagctgcgcaccgcccggttccccaccgcccggttcctcagccatggcagtgaccgcaaggcccatgctgagcgctgctgccaccataaacgtaatatatccttttcccttcatattgacctcctacataatccctatcattttaaaccaggtaaatgacgccgccaccataatgccccattttgccagcagggtcaggacaccgtatgtcatttcctccaggaccgtgaattttcctgtgctgtaatatgtcaggttcaccttgctgtgaggcggaagcgtgatggtatcgcatatcataaaggacgccggcagggccagagccacaggattgaatcccgccacctgcgcaatggatataatggtgggaatcagaatgatggtacgaaccgtcttgctggtgaacacaaagtgggagaagcttgcaataaaaataattaccgcgtaaagaaccatgaagctcatatgctccactcccagcttgtcaaacacgctgtttaagacccaggtagccacgcctgtatcgtccagggccagccctcccgcataagcgccgcagctgaaaatcatcagatcccagggtatctttgcttccttccaggtcaatatccctacatggggcataaggaagatggctgcggacacaatggctaccacaaccagggatatgtcgaaaccaaacatggcgccatggtactcgtctgttgcccacaaaaagatggtgataaggaagataatcagggcccgcacttccactccgttcatttttcccagtcccttgtactcttcctccagggccatcatcttctccgcggaagcagaacggtttcccgtcttaaagagcatttttccgataaggaagctggctgccagtgtgataatggcaacaggagcagaggcaatgaaccacttcatccaggaaatctccgtacctgtcaggtccttgataaagctgatagccagaatctgggaggatgtagccgtcacaatggctccggtggaaaggttgttggcctgtatcccctgcaatgccataagttttccaaaattccggtcctggggcgtagtgtttcccacctcaaagacctccataatcatcatgacaatgggaagaagcatcacagccctggctgttgtggacggcaccacaaaggcaatgaggaaattagttaccatcagcacaatcagcaccgtgttgacgctctttccaaaccgcgtgaccagaaacaatgccagacgttttgcaagtccgctcttttccatgcccgaagcaatgacaaaggctgctatcatcagccagattacttcatagccaaacacgcccagggtggctttttctgtccaggcccctgctgccggaagcagaaaaatcacaatcagtgaagttacatagtttggaatcccgttgctcacccacagaatcagtgcaaacgcaaagatgcccatggccatcttgcctgaataggacagtcccgcgggagtcctcatggtccaaatcagcgtcagtgccaccaacgctgccggtagcccgaaatacgccatgcgcatttcaaaagggcttttctgtttttttacctttgccggtacgctgctcaaaatacccactctcctttttgtaccgtctccggtactctgtttgattttgtattgctttgatgttaccattgtagtcttaatccctggtcagttccaatcaataatccttatatcctgtcataacagaacgttatagttaccattttagtcccgcctcccataagacttctttatagttggctttttccctttgatttctcattgaaaatcctatactttttcctctgtttccgctaaaatacaattaataatgtttatggattggaggaaacacacatggatttggaatccctggagagttttctggaggtggagaagcataagaatttcacaaaagcggcagaaagcctgttctgtacccaggcagcggtctccatgcgcatcaagcgactggaaacagccctggaatgcggcctgttcaaacgctgcggccggcgtgtggagctgaccagagagggagagattttcctgccctatgccagacagatggtgaatacctggaagtctgcgtcggaacatctgctgcagaccaggctgatggaggaaagcgagatacggatcacctcctccagcacgcccggaacctacatcataccctcgctgatttacctgttccgccagtcctatccctacataacagtgatcaaccacatccagtacacccgcagcgccatatcagatgtgattgggggaaatttctccctgggcattatctcccagcccgcctcggtgggcacggacgtgctttgctgcgagccgctgatggaggacccccttgtgctggtagtccatccccagcacccgtgggcggaaaaaagggggattctctttaaagaaatcacggaagaaaccttgctgatttccaatcccaatacgtccctggtgaattatctggaaaaggagggccgcctttccttagaaccttccaggctttatgtggccggcaacatcgaggccatcaaacgcgggatacgcaaccaccagggaatttccatcatgtctgagtatgcggtgcgccaggaactggagctgggccttttaaagcaggttccccttctggatcatccgggactgaagcggcagctctataccattttccgtaaggatacccggtttaaactgtccaccagtctgtttttggaatttttcaggaaggccgcggaggataaccggcttctgtcccagttatagacaggttcatgcttccatacttaaccatcagttaagaaaatcctcccgctgtttaacggcgcctccattgtgcagcgccgttctatggtttatactaaccatatccggccggacaaatatgttttagcgaaggagagattataagatggatataaaactaggtccgcgcattgcgtcactgcgcagagccaaatccatgacgcaggagcagctggccctttccctgggcgtatcgcctcctgctgtcagcaaatgggagacaggcgcctcctgcccggacatttcacttttatgccctctggcccgcgctctggaaaccaatgtggataccctgctgcagtttgaggaaactcttacagaagaacagattgacgcccggctgaacgaaatcgttgagacagccagaaaccatgggtatgaagctgcggacggcatggtacagtcacttctgcatacctatccctcaagtatccccttaaagtccagggcagttaccctgtttgacctgttcgcgatgttgtttcccgcccagccccaagagattaggaatggctggacgaaacagaagaaacagcttttagaggacgtgcgggcaagcggcgccgctgcctgctggcaggcggcagtatcccacctggcctccatcgccatttcggaaggcgagctggagaaggcagagagccttttaaaggaactgccccagcacaccactgactccacctctatctgggccatgctgtacctgaaaaaaggagaagcttcccaggcattggaggtcatacagaaacgcctgtatgtgctgacacgccaggtacaaaacttcctgattcagatgatgaacccggaaatgaccccagacaccgcaaggacactggaactgtgcgttatttaccgccagctggaggagctgctgggcgttggaaacggcatgagtcccggcttctttgcccaggcttaccagcgggccggacaagaccagcaggcgttggacagcatgattcagtttgtggacgccatcaccggcactgtccagaagcccaatcccatcctgttctctcctgcggtaaagatagacggggaacatcctgccgccacaaaggaaatgcgtgaattgctcctgaagagtctgctggatgatgggtattataaacagtttcatgataataaacggtttatgaacgcagtggataagctcaggggtagtattcaggaagacacagcctgagcatcttatatggaaaaaggacagccgcttggtaaaaatacctgtcaggctgtcctttatacattttttatatcatcactgcacatcttccacccagcacatcttggcggacttctcaatatgagccctcatgactgcttccgcttcatccggatctcctcgtttcaggctgtcaatgattctcttgtggaattcaattccatcctggtgtccctcctgctgcgttacaattcctctcagcagaattgtcttccaaagactcaccatggagttaatgaaacaaatcagcagcggatttccggttgcctcggctatacagatatgaaactggatgtcatagtcaatgcgtttatcccatacatccttactttcaatcattccctgcagatactgttccagcttctcaaaatccaaatcatcctttttttcagccacaaccctgctggcatagggctccagcagcttgcgcatctcatatacatccatatatccgatatcatccagccgcagcatgcggttgagaatctctgtaacacttccgctttcaggctttgctataaaggtgccttcaccgttcttctgcacaatcagctgtctttccttaagcagtttcaaagattctctcatgacattacggctgattccgaatttcaatgccagctcctgctcacttggaagccgttccccctgccgcagcgaattactcagaatcatgtcctccatacggtcagccactgtctcatataaatttttcttctttactttgaaatccagatcttccatatacattacccatctctatcttattattctaaaaaccccggcggttacatgtccccctcctacttatcttaatacaacaacagaaaagttacaagaattttatcggccaaagagtctcggcagccacataatgacatccggcacaaacgttacaagtatcagcaccaggaccatcacaaaaaccatgggcatgacttcttttatgatggtgttcatcttctctccgctgattcctgtcacaataaataatagcatgccaaaaggcggtgtacaaagtccaatcatggtattcagcgtaaacaccaccccgaaatgaaccatgtcgataccaaaggactgggctatcggacataggataggcagcaataccagctgtaaaacagctgaatccagcagcatccccagtatgaacagcagtatgttgacaaaaacaaggaaggaaacctttgtggtggcaaaagacagaatcagatttcctgccagagacggaagattctccactgcaatcacataagaaaacacataagcagcacccagcataatgccaatctgtcccgtagacttcaccgtattcttcaatacctggataaactctgacagtgttatggaacggtacgcaaaaacggatatgagcagggcgtatagggctgccactgccccggcctctgtggcagtcatgatgcctgtataaattcccatcagaaggatgatgggggttaggagggcaggaaccgcgctcaccgtcattttgatgaattccatcccggcatattttcttccgctgggataatttctcttattagcaatatagcagacataaatacacagagccagggccagtataattccaggcaccatgcctgccagaaacaggttgccgatggatgcgcctgcaatgaccccatatattaccagggggatgctgggagggaagatggggcctattacagcggaaccagctgttatggctgcgctgaacccgtcatcatatccctcctttcgcatggcctcaatttccatgattccaagtcccgatgcatcagccaccgcggaacctgtcattcctgaaaatatcagggatgcaatgacattcacatgtcccaggccgcccttccaccggcccaccagaaccttggaaaagtcaaatatcttatccgttaccttgctggaattcatgatattcgcagcaaagataaaaagcgggactgccagcagaataaagttattgtacatcttactggtaaaaatttccaccaccacactggggtccatacctttcacagccagatagagcgtggaggatataatcattcctatggctatcggcatcctgatgacaaaacacaccaccagcaaaccaagggaaatcatcatggcatggctcatactgcctttcctcctttccgaaattccttataacagcctgccaggtccccgcagtaccggacaatggtaataatctgaaacacgaaaaatcccagatatacaaatcccagaggaaccttgaaaaccgtgctgtacctggtaaaataaaacctgtaaaactccagtgccggcggtaccagatagaccagcaggccaactatcaggatatcctgaaggaaccggaacagcctcctgaccttctcccccacaagttcataaattacagaaaaaacaatattatcatctgtccgctgtgcatagcagcatcccaacgtaataatccatacataggaaatctgcgccagctcataaggccataccaggggattattaaatatgtatctggatataatctgcaggatgaatgccacaaacagcagaataaaccagcacataggcatgtaaatctctataaaatccatgacagcctgaaagcatttcttccatacgtccattcagaatacctctcattaatatttcaaatcctttatctgatgatacaattccatatcccaatcttttaccatatccttgtcgttcaaataatagttctcagaatactccatgaacgcattcaggtccggttcaataaccgttaatccctgctccttcaggaacgtaattgcttcctgttcctgcttcaggtttgcctcatcgcaccacgctgtggctgtcttaactgcctctgtcatgatatccctgtattcctggggaagagactgccatttctcctcattgattgcgatgcacataggctcaatcacatgacctgtaagaacaatctggctggtcacctcataccatttctgtgcaatggtggtaggcagaggattctcctgtccgtcaatggcgcctgtctgaagtccctggtatatttctgcgtaagccataggtgtgggattagcccccagcgcctttcccataaagagccatgcagaagaattaggcatccttaaattgacaccgtttaaatcttccggttttgtaatctctctgccaatatccctcatatccagatggcgagctccgcagtaaagtgctgacagccagcgcacatttaatttctcagccacatcatccgctaccttctggccaatctctccatccataactgccctcatgtgctgttcattctgaaaaatataggctgccgtaaacatagtcaggtacggcatctggtcggatatcaggaacggtgagctgaacatcatgtcaaggcttcccctggcaacagcatccacctctccctcttgggtcatcaggcttccgttttcgtggatttccatcgtaaatttaccattggttttttctgatatctcatctgctatcatatgcatggcctttacataatttacatcgccgctggactgtgtggaaaataccagctttacctccggcagctctgcgcccgcatctgtctgcggctgctctgaggcatcaggggctgcttctgtctttgcctgcgcctgcgatgggctctttgtctcagatgtcttttggccgcacgcagccagacctgcggtcattgcaagcactaatgcgatactaattatgcgtttcttcatagcgtttatcctccctattttgcctgaatctgtctcaacatgtttagttcctttcgggcgccgtccataatatgtacataatctgaaccagccgatatcacgttaatgcccttttcatgccagtagcgtatgatttccgggtcatcgctgcctgtggatacgccggaagactttccgctctcattgatgatcgccaccgcctcatcaaccaggctgctggtatggtcctcaaatacacggttcagctcccctatggagccggacaagtcgcagggccccagaataaagcagtccacataagggttcttgaccatttctttcagattctttactgctgtctttgtctcaatctgtacacaccggaccagctgctgcctggatgactctataaatgaatccgcatcatccagcccgtacctcactgcccgcaaggggccaaatcccctaatcccataaggcggatacagggtggcctgcatggcagcgtccagctcctgggctgtattgaccatcggaatgatgattcccgtagggcccatctccagcactctttttgccaatacctggttattccatggaatacgaaccagtgtatccgtaccgcctgcctttgcacccatcagatggtacagcagcacctggtaatcaatggctgtgtgctcggtgtcaatccacaaaaaatcatatcccaatccggcacacatctcactgatacagggttctgtcaggcatatatgcatccctgacaattcatccctgtctctcagcttctcctttaaagttttcatgtttacctcctccaatgtacttacggcattagctatacagctatactactagtatatagctatacagctttttgtcaagtaatgatgtgtgactttatttaaatccagcattttaccccaactattttgtgcacttttaccacaacagccatccttcaatcgagtaggaggcggtgattaaccgccgtcctctcacaccaccgtgcgtaccgttcggtacacggcggtttcaacagttgacgtgcacagactgataagctgtggctaaatcataaaagccactgcttatcagtctttcttttgtcattgccatatttaccgctaccgtttgcgtggtaaaccaatatcctctccggctgtttcctgcctgccatgccaaatcttccggcactcccattttccgcaggttcttcaccttggttctcggtttcttccattgtttccatatacacattcggattctgtggtatagccacttattgagttcttctattcggttcttcatttccgcaatcccgtaataattcagccagccacacatatacacttttatctttgctaatgcagggcgtatgctctgagcagaccttcgggaactaagttctttcagctttgacttcattttcttccatgactttccatgaacccggacatatatgccctttccgttctttcccaatgtaaagccaaggaatttaaaagttcggattgcaaacacgctgactacacggctttcctcttggttcactttcaatttcagcggcccttccagatatttcgtgctcgtctccatccgtctcttggcagctctctcgcttttcgccagcagcacgatgtcgtccgcgtaacggacaaatacaactccacgcttctgatactcctggtcaaactcattcagatagatgtttgccagcaggggggaaagatttcctccctatgcaaagcaagtaactatgcagagtaaatccatgaaatccctgtttcaagccattttttcttgcgctgctttgtatagtctccgaagatatttatgagagctattctcgaaaatatcatatcggaggtgtctttatggacaaaacatacttaccagacctaatctcaggactggaacaagaactgctccggcttggctataccaaagggagcatgacattttaccgccggcgttggaaccagctgatggcctatgcggaagacaggggtgaatgctattacacggaacagcttggcatggatttcctgaaagagttcttcggaatcacacaggaggatttttcaaggactctgccacaggcagaaacacaggagatccgtgtggtccgtatggttggggatttccagctccaccatgcggtgcttcggcgttatctcaagcataaggaaatactgacaaccccgttttttgtggatatccgcagccggttccggagttcctgtgagaaaaaaggctattcccaggtgactacggagcattatgtgaagcagtcctcttatctgatggattatctggccgcacaagaaatggatgatttcaatgcagttaccctggatacggttcatgcttatatcaggacactggtaggtttttcctacaaaacggtggagcagcatatctgttccctgcgtgcctttttccgtttcctgtaccaggaaggtatcgtgcaggatgactttgcagcaaaaatgcccatggtaaaagccaggaagcagactgccatcccctcggtctggacccatgaagaactgaagcagctggtcggggccattgatcgggggagtccgaaaagcagacgtgactatgccatcatcctgatcgcgtgccgcttgggtctgcgctgcacggacattaaaaacctgtgctttgaaaactttaactggacggagaaaaaactctgttttacccagtcgaaaacagggcagcccatggaactgccgcttgtcccggatgtgggctgggcagtgatcgattacctgaaatatgggaggccgaaggttgacagcagccgtatctttgtccgccatatggccccgttccttcctttttccgatggggaccatcttgaccagctgataaggacatatatggtaaaagcccacatcccgatgggcggcaagcaccgggggatgcacagcctccgccatactatggcaagcgtccttctggagaaggatacccctctcccggtcatctccgatatcatcggacatctggacacgaattccaccgccgtgtacctcaaggtggacatggaacggctggcggaatgccccctggactttgaggaggtgatccatcttggctgaacccacctttacaggccctttccggaaagaaatggaagactttatctccctcaaacggtctgtcggatacaaatacaacacagagcctggcatactaaagcgttttgacagctaccttgcggcaaaatatccagatgcggctaccctttccagggaggttgtgaccggctggtgctccagaacaatgcacgaatcgaccgcaaaccattgtttacgggcctcggtagtacgccagttttcaaagtacctggacagcattgggaccaacgcatggatacttccaaggaattattatcctgtcggccagcagtatgtgccgcatatttataccccggatgaactcaggcgtttctttgcagaaacagataagtgccgtctgtgcccggaagtcccttacaggcatctggtgataccggaattcttcaggttgctcctttcctgcgggctgcgatgttcggaagcccggctgctcacggtacgggacgttgacctgcatcaggggatactgacggtccgtgattcaaagaaccataacagccgcctggttccaatgccggaatccatgaccttgagactacgcaggtatgccggacaggttcatccttttccagagccttcaggatattttttcccaggttacggtgaaaagccgatgacactggggaatatctataaaaacttcaggcgctttctctggaaggccggcatctcccataccggggacagccccagagtccacgatttcaggcacgcctactgcatttaccgtctgaaacagtgggcacagcaggaccgggatctcatggtactgatccccatgatgcgcacctacctgggacaccagacctttcatgaaacagcctattacctcagatggacggcagatgtttttcctgatatccggatgaagctggaaaagtgttataaggacatcatcccggaaagggaggaaaccgcctatgaagccgactgatttctccatgcacctgacagctttcttgtctgactatctccctgtccagaagaatgtcagcagaaacacgataaaatcctacagggatacttttaagctcctccttcttttctgcgaaaaagaggaatctctcccggtggaaaagatcaccatgaagaagctttcttccgacctggtcgtacggtttctgaactggctggaggcagaacggaaaagttcggtttctacgaggaacctgcgcctgacagcgatccattcctttttccggtatgcccagtccgaatcaccggaatccctgtaccactaccagaaagtgcttgccatcccggtaaagaaaaagaggcaggccgtagtggagcacctgtccccggaagggatcaggcttctgctggagcagccggatcaatatacagtccatggacggcgggatcttgccttgatgagcctgatgtatgacagcggcgccagagtccaggagatcgtagacctttctgtcagggatttcatcccaggaaacagtcctgtgctggttcttaccggaaagggcagcaaaacacggcgggttcccatcatgaagaatacagctgcgcttgtggaagcatatatcttcgaaaacaggctggatctggcacataaggccagttacccgctttttatgaataagcagcacaacagactgacgaaggaaggggttgcttatgtcattaacaaatatgctgtcatggcgcacggaatatctgacaaagtaccagaaaaagtaaaatgccatatgctgcggcattccaaggcggttcatctgctgcaggcaggtgtaaacctgatctatatccgtgactttctgggccacagtgatatcaagaccacagaaatctacgcaagagccgatacggaactaaagcgaaaagccctggagaacgcttacccggaactggtagattccaatctgccggactggagcggaaacagtgacctgatggcgtggctgtccgagttgtaattgctataagcagaatactatgcaaagtaaaatctgagagaatcttttatttataaggaaaaacagtacattctttgcatagtcttctgctttgcatagggaggactatgctaagctttgcatagtcctccttgcggcgaaccttcttctgtttccatgactactccgtcttccatcacgccactctttaagtacctcttaatccactggattaccctttcgttcctcacatttctgcgcaggatattcaggagtatctcatggttcagggtatcaaagtatttcgacaggtccaatgctaccccatggatatatccctgctctgcatactctttcaccttctgaatggcatctttcgcgcttcttcccgggcgataaccgtaactgttctccgagaacaatggctcgtagaccggtgtaaggcgctgtgttatggcctgttggaaaatgcggtcttttacggttggaatgcctagctttcgtattccaccgtctggcttgggaatctccactcgtcttaccgggtcgggggtatactttccccttctgattctctcgataagttctttctggttttccctcaggtatgcgcctatttcctccacggtaatcccgtcgattcctggcgctcccttgtttgcctttactctcttaaaagctctgttgaggttgcccttctccagtatctcctccaagagttccggctgtgcactgtccctttccttccatatccggcggaaagaacggtgcgctctcacatacccttcacgttccgcgctatctctttgcgagcagctatctttgttttctgtacccaatgttccttcctcctttcccagttgtactaaagactcctgttgattcggtccttcatctctcgactactacgacctcggctgacttctgtacgttcagcactatctttcgataatggttatccctttcaggacattccgcacagacctccccgggtaccacacgtctctttctctccatctatctgccacatttaccatacgtgattccgtgtggttattgggcctcgacttgttcagcagccttaccctcacgcatggcctgatgtgatttctgtccgtcagaccagagatttgcccatgggttagtatgttccccacatccggcttccttcagatttcacctcacgatgaacacccttgccttcggctatatccttcccaccaccgggcggattccggactttcaccagttagagacgtgcgccgccgggcgcacggaaaaaaccgccgctcccaatcactgagagcggcggtccgcatcattcccgataaaatcccatcctctcaccaaagatgtcttatcaggaattcttattcattttccttccggaattttttactcttaaacacatacacatgggcagccaatgtgactccgaacacaaccagcagtatgttttccgccacatccggaaaccggttcatgcccactcctaagctgcatgcagcatccacaaggaatatccacttttccacctgaaacaccttatccaggttgtagtcctcctttttggtggagcccataaacatgaggaaatcctttcctgtaaagagacatataccctctgccaggcacagagcccccataaacatatacaatgtatccatcttccggtccttatgcctttactgtacttgtatgattctgctccacaaacctgcggatgttggaagcattggcaaacttctgcacgatgccgtcactgacaatcaccagggtaggcgcctgcatgatgccgaatttttccgccaggtcaggacgctcctccgcatcaataatctggtaatcctgtccctttaagaactcctttgccgatacgcagttggggcaggtcttggtggtaaagagatacaggtgagtcaaggcgcctcccttctccttcccctgatgggaactctctgttctggcactgtccgtcctctccctggtatctgccgtgattctggacacgccatgctttaactgggattggcctatgttgtagttggtacggttcttgtattcctgggtcttgccttcgttccagttctggaccggacggtaatagccggtaatacggctgtagacctctgccttctccccgcagattggacaggtaaaatgctccccaatcaagtatccgtggcacttgcagatggaataggtaggcgacaatgtatagtaaggcagcttgtagttctcagcaaccgtgcgcaccagattggccgcggccttccagtcaggcatcttctcgcccaggaacgcgtggaacacagttcctgatgtatacagggtctgaagctcatcctggatgtccagggcgtcaaatacatcctccgtataatccacaggaagatgggaactgttggtgtaatacggcgtatccccctcttctccggcagtgataatgtcgggatagcgctgcttgtcatgcttggccagacggtaggtggtggactcagccggcgtagcctccaggttgtaaaggtcgccgtactgctcctggtaatccgacaggcgttccctcatgtggttcagcacgttcttggtaaactcctggcactccctgtgagtcatgtcctttctgacccatctggcattgaggcctgcctcgttcatgcctatgagaccgatggtggaaaaatggttctcaaaggtgcccagatatctcttggtgtagggatacagcccctggttcaaaagctttgttatgacctggcgcttggtctttaaggaacgggcagacacatccatcatgtggtccagccttgcatagaagtcagcctcgtccttggcctggtaagcgattcttggcatgttgatggtcaccacgcccacggaaccggtgctctcgccggagccgaagaatccgcctgtcttcttgcgcagctccctgaggtccagacggagacggcagcacatgctgcggacatcgcttggctgcatatcactgttgatatagttggagaagtagggcgttccgtacttggatgtcatctcaaacagaagccggttgttctctgtatctgaccagtcaaattcattggtaatggaataggtggggatggggtactggaacccgcgtccattggcatcaccttcaatcatagtctcgatgaatgccttgttaatcaggtccatctcttttttgcagtctttatacttaaagtccgtctctctgccgccgacaatggcattcatctctgccatgtcatccggaacagtccagtccagggtgatgttggagaaaggtgcctgggtgccccagcggctgggggtgttcactccatagataaaggactcaatgcactttttcacctccggatagcttaaattatctgcttttacaaagggagcaaggtatgtatcgaaggaagaaaatgcctgggctccggcccattcattctgcatgattccaaggaagttgaccatctggttgcagagcacggacagatgctttgccggcgaggaggtaatctttcccgtgatgcctcccaggccttccataaggagctgctttaaggaccagcccgcacagtatccggtaagcatggacaaatcgtggatgtggatgtccgcattgcggtgggcctccgctatctcctggtcgtaaatttcactgagccagtagttggcagtcacggcaccggagttgctgagaatcagccctcccacggaataggtaaccgtggaattctcctttacgcgccagtcctccacctttacatagctgttcaccacgtccttgtaatccaggatcgtgctgttcatgttccgtatcttttcccgctgcttcctatataaaatgtaagcctttgccacatctgtgtatccggtctgttcaaggacatgctccacgctgtcctggatttcttccacagaaatccttccatccttcatcttattctgaaaatccgcagtcacccttaaggataataactccagaatctcattgttgtaatctttggatgttgccctgaatgcctttttgatggcctctgttatcttattcagactaaactcggcaacttccccatcccttttaactacctgaatcataccacttgctcctttcaacccacgtacactttattcaaccctttttccgcgtctggtagacccggaatgatacagctgtttcacagctgtgaaaacgcagggcccgctccatgcggagcgagctacgcacccattatagcagatggaaatgcaaaacacaatatctatgaataacattttatattatcccagatattgtgtcttattaactgtacttataactcttttttccaaatccctgcaaagccttatacctgcgtggtttttcggacagggggcattttattatatttccaattaaattcagtcggaatacagctttccgaatagctctgccggcacatatgcctttaccgcgattccatcctcctggtattcctcctccagaagctgaccgtacttgcggatggtctggatacgccctgcctggctgtatggaaaaactttttccaacagaatccgcctgctgcgtataatggcctggagcaccttctgcagttcttccagtccctctcctgtcctggccgatatcctcacctggtagtctgatgaaaaatccctgggaatctgcatgacaccgctgttctgcccggcctccagctcacggaaacggtccaccttattgaacacggtgactatggtcttatccacaatctccagttcctccagcgtctccttcaccacgtgcatctgcatgtccatctgcggattggagcagtccaccacatggaggacgatatcgctgtagcgcgcctcctccagcgtactcttaaaggcttcaatcagatgatggggaagcttgcggataaatcccacggtgtctgtaagcagtatctgctggccatcctccagggtataactcctggtggtggggtccagggtggcaaaaagcttatcctccgccaggattcccgccccggtcagacggttgagcagggtggactttcccgcattggtatagcccacaatcgccgcggaaagagcaaaattcttctctctctgctgcctggtcacctcccggtggcgcttcacatcagccagttcctctttaagctggctgattcgctgatggataagcctgcggtctgtttccagctttttctcaccgggacctctggttcctatgccgcctcccagacgggacaaggaattgcgcattcccaccagacgcacggccctgtattttaactgggccagctccacctgaatcttgccctctcttgtgctggcccgtgaagcaaagatatccagtatgaccatggtcctgtccatgaccttggtgtccagagcatcctccaggttcctgagctgggccggtgacagctcatcatcgcagataacgcctgtggcccgggtatcccataacagctctctcacctcgtctatcttacccttccccagataggtgcccggatgtaccctttcccggttctggatgattctggccacagttacagcccctgccgtggaggccagctcttccagctcatccagggaagcgggcgtgtcctcctcctcggcagtgctcaccgccaccagtattaccttttcctgcagttcactcaaatcaattaattctgccattcctacctcgttttcaaaaatgcaatctcatgctccgcatcttcattggagccgaactcctttacaaagtcctcaaataatgccagggctttgtcgtactgctgtaagtgttcgcaggcagcggcccggttatacgaaagctccttcaaaagttccctgaagccgtctgcttctgccgcgacagccggcgcgttttccccgcctgccccttccccggcgtccccatccttcgtttcttttttgtccgtctccttgcctgttttccggtctttctcctgtagagccgcagcctgggcagcagccgctacctggtaccctttgtcaaaagaatcatatgcactctggtaatcctctgcagccatctgacatagacccatttgattatagatttcaccatgttccatcccatccttcagtgcgtcttcataaagcgccatggccttatcgtattccttcgcgtccacacaggcgcttcctgcggccagcagggcctcctgcctgccgggcaccggcttgtccttcttatccagcgccttagcctcctggtagcgctcaagggcattatccgtatctccaagccgggcatagcagctgctctgcctgtacatatactccggtgtgtccggcttcatctccagaagaaggtcataggtgtggatagccgcattataatcctttaacagaaactctgcatccgccctgtataagagcacatcccggttgaaatcctctgctcccttgccggacttttcaagagccgtatcaaaggatccgatggcccctgcataatctcctgcctccagcttctctataccctctgcacggaactggcgcttcttggaggtggtcatgtgcgccaccagccggaatgttcccgctgcaatcagccccacgagaaagatgcagactgcccacgcaatgaccgccctgataatccggtttctcctgcggcgcctgcgcgctgcattggaaaccggcctttttcctccgtatccggggtgctgcccctttgactggggcctgcgcccgctgctgtatgacctctgtccacgacttcccatatgtttctacctaccttgcatccgtacttccaaaaccgccgttgcgcacatcactgcattcgtcgtccgcggtgatgccgtaaggaatgaaaattccctgtgcaaatccggcgccctgtcccagctccacagtctttccctccctggaatcattggtcaccttaatgaacatatggccttcattgtctgaataaaaataatcgctgtcaatgattcccaccgtgttgttcagctggagcctgaatttaaatcccaggctgctgcgcggaaaaatctggagcacccagccagtgtcaatctccgccctgacgccggtggggaccttcatgctctcaccaggggccagggtaaggggaaccggagtaaagaaatcatatccagcggagccggaagtggccctggccggaagccggatcccttcataaatatgtattatctcttcctccgatgtatccgggaaagcatcagcccaatctgccttaaactgttcaaaactaactttatgaaatttcgcaattctctgcataattttctcctgtctctttcatacttttacgtaacagtccatccgatactgcctgtccgtttctttcagtcaagaagatacgccgtctgaactgtggcacttttacaagtctatcatactcctatggaattttctactttattttttattccttctttattagaaactttgatatattcatattcattacaatcatataggaacttcacttttagaagtattacaccgaacagagggacatctatgaaaatttcctacaattcccagccgcagagaaatctcattggcaaccagattttcaagctgcgcaaaagcagaaaactatcccagaaggaaatggctgcccagctacaggtgcagggctattatttcagcgaactgaccatactcagaatagagaagggcaaacgtcttgtgacggacattgagcttaagatactttgcgattatttccgcatcacccctaacgatctgttgggatatggtgatggcggccgtctggtatagcaatgcattgtacgtgtatttatgcattatatagtgaattcccccactactacatttcagcctaatgtttttttcacctctgggatacaataatacaaaagattttgtagataatagactatggtggtgaaaaacatgatgagttatgagctggagcgcatagaagagctttgcagagagcggggatggagtcattaccgcctggcactggagatggatacttcccccaataatataggcaacctgttcagacgtaccacggttcccagtataccgaccatacggcgtatctgcgaagtcatggggataaccatggcccagttctacagcaccgacggcatacaggttaccctgaacgaacagcagaggcggattatggacctgtatgataaattggaccctctggataaatcaaaggcagaagcctacatggaaggactgtcagccaaggcaaaagatatatagcggtaaaacggcggttaaaagcagccccggaccagcgtatcggaactcccttacgccggctgggctgctttttttcgtgtttgttatgtttttttgcgcattaattttgttttttgtttttcttacctgtttttcttacggtcgttctcactggtaaagggatgaaaaatatccataaattggcagtccatcagggtaagccataccataaggcacggtccaagaacattttcagccatccccccatcaatgaaggaccttcatcaaagccaggaccatcagcaggacgccgctaatccaggacaggtcgcaccggaagcgtgaggccaccttgcgccccagccacaggccgccgtacatcatacatactcccacggcaaatgacagtgccagggttgcggccacaggaatatcaagcagggctgccatggttccggccaccaggctgtcaatggacatggccagagccaggaatacggtctccttccatccaagggactgggagccgtccacgtccgccgccatgggatctccgtaaatattgactatgaccttcagtccagacagggaaaagctgagattacggcggatacagcaatggcggttgatataggccttaatgctgtaatccaggaacttgatgaatcccagcagaaacaggcttacaaagcagataatcctggtcacatcccccggaaggacagagcttataacgtttcccagccccagggccagccccaggcatccgctgcatataccgtttaacaaagctacctttccccagcccacatggacccggttggctccatatgcaaggctggccacaaaggtatctgtacagagagcaaatactaaaatcagacttccaagcatgatatcaactttttctttttattttagtatattcctcatgtactgctttgggaatctcctctgtgtacaaacacggggcatcaggcttccggttcccgggccacggctgtttcctcagccgtcgcggcggcttccatggcagtcccggccgtctcagcggcttccatggcggtctcggccgtctcagcggcttccatggcggtctcggccgtctcagcggtttccatggcggtctcggccgtctcagcggcttccccagatgcagcctcaaccgtcagttcctccagcttaagctgcagctcctcctccacctccgccttgatctccgcttcctgctcaggacccaaatccggcaaatcctggaccgatcccacgccgaacctgcgcagaaattcctctgtggtggcaaaaagagccggccggccgggcgcgtccaggcggcccacctcgtataccaggttgtattccaccagacggttcaccgcgtggtctgacttgacgcctcgtatcttctcaatctccatcttggtcacaggctgcttataggcaatgatggacagggtctcaagcaccacttccgtcagcacctgttttttgggggcagaggccacccgtatcaggttttcgtagtaggctgccttggtacacatctggtagctgtcctccagctgggttatctccatgccgcttctggctgacctgtaccgctttatcaggcgctccactgccttcctggccacttcttccggctggccgatggatgccgccagctggcgaagctccaccgaccttcccatggtaaagagcactgcctctataaccgcctcctgctctttttcatcctctgtaggaggaaaggcaagctccatctgcccttcctgctcctttgcttctcttttctcacttccggccagctttccggtgcgggtttcaaccacgccggctccggcctccagggcttctattctgtctttactactcataagattccatccatcatccttcaaaatcacccagttgggccaaatccagctcctcttcctcgccttcctgctccagggtctctatgtccatgtccccaaaggtctcctcctggctcaaatgaatctttcctatcttcataagctccaaaaccgccaggaaggtaaccaccacctccagcttgtccggctgtccctccagaagttccctgaagctgaatctgcgcttcctcctggcgtaaagaagcacgtttcctatcttctgttccaggcttacgggttccctgtgtatggttccgaaattgctccggatagggtcaatcttgtcctccttgcgcttcattacctgctcaaagattctctggagcttagccagcgtaagtccgtcaaggagcttgtccaggtccaccggaggctcatatttggcaacctccggcggcagggtggagggcttatagagatgctttagagccccatcctccctgtcagccagttcatcggccatcagcctgtacttcttatattccagtaagcgcataaccagctctgccctggggtctatttcctccccttcctcatccacttccttgggaaggagcatcttagccttaatgtcaagcagcgtggccgccatcaccaggaactcgctgacaatatttaagtcctcccgctccatatggcgcacatagtccaggtactgggccgtgatttccacaatgggaatatcatatatgtttatcttatttttctcaatgaggtggagcagcagatccaagggaccttcaaaatgctccagcttataggatatggtttccattctttcacctgtaagtggcattcattttatggttttttatgcctgtcacgcccttctcaaacggattagcaccagctggggcctgttgttcaggcggatattaatagagtgggttcccagtccccggctgacaatcatccgcttcccgtcccgctcaaaatccccggcgcaccagggtaagaaaaactggtactggggcgtcatgactccccccagtcccggtatgcggatggtgcctccgtgaaaatgtccggccagagtcaaatccgctccccatcgggcataggaatcaaaatacagaggggaatgggccagaagaatggtgaagggctcctccttgcagtcagacggtcctttgcccagtttccgttccagatagcccgggggcatgggcggcaccttctggtacagggccttccggtagaaacagggggctaaatccagaccggcaatccttaagtcccttcccagaaaagcacagctgtcctccaggtagctgacgcccatggcggtcatggcatccctgtactcctcgtagaggtccccgtataagctgcgctcccacaccatgcggttctcatggtttccgttgccgcagtaaaccggatagctggctgccagctggcggaacagcttcagcgggacctttatgtcccgctttcccttgcagaccatcatatctccgccggataataccgcgtccggattcagacggtgaatcgctgccaccagttccccgttgtcccggccaaactcgttattgtgaaggtcggacaggaatatcaggttcctgtccctttccagtttaggggaaatgatctctgtcacttccactgaaaaatgctttttttcgtactcggaccgcagcatacaggcagcgcctgccgctgcggccagggaaacggcttctttccacatataattcattcctttattagatgacagcttcttttccggggctgctatggctgctttaatgacagactgccgttctcaaagaggccgatgacatctgtaagactgtcacagcaggcggtcagcagattccggatttcttcatccggctggtcctggtcaggtatcatcactggattaaaaccgcctgctgcggctgccttgattccgttaaagctgtcttccaggacaacgcatgccccgggatccacccccagccgccgggctgccagcaggaagatggccgggtttggctttgcttccttcaccatgtccccgtatatgtaatcgtcaaaatacttctccacgccggctcccctgacattgccctgggtccagctttcactgctggccgtggccacggctgtctttatgttgtggtctttcaggtatataagcagttccttaaggcccttttttaccgggacgccatgctccgcaatccagcggtaggagtattggcgcttctcttcccggaacctgtcatagtccttcatggcctcctcaccgaactgctgtgtgcagacctgttttaccttgtcaggtttgcatccccggattccccgcaggaaattgccgtccacatggattccgtatttaggtcctacttcaaaccaggatgtggcggccaggctttccgtgtcaaacataagtccgtcctggtcgaatatgactgcttgaattggatttggcatatatctgttctccttaataggtggtaatcagttttcagtctcatttgcaaagcgcggccggccctgatttggctgtgttccttcagggccccgggctttgcctgcgtggacattataccaccctctcaccctctttgtaaaatcttattttgtctgtgggctactttgtctgcttattcttctgcatattatcctgcagataccacggcgccagctccttgcgggcaaaatagccctggtcgtgacggcatacaggacagtactgagggggttcttctccttcatatatatatccgcagttggtgcagatccaggtttccttctgagggctcacatacaggttcccggctcccagcaaatctgccagatactggaaacgctcaccgtgagtcttctcaatctccgcaatcatgcggaaggtggccgcaatctgggaaaagccttccttctgcgcaatgtctccaaaggatttgtacaccacgtcatgctcctcgtattcgttgtgtgctgccgcattcagctgagccagggtgttcttttccaaatccaccggataacctccgtctatgaatatggtttccttatctaacggcttcagatagtcataaaatatttccgcatgttccttttcctggtctgcggtgtagcggaataccgcctccaccatgggcatcttctgctcctttgccagccccgccgcaaaggtatagcggttcctggcctggctctctcccgcaaaggctctcataagattcttagctgtctcgctggtcttaaaatcagtcatggattttcctcctaattatatatgaaaacagtgtgacatatggtcattcctactattcccattcttctctcttttattcccatttctgccaatcctccttgtatttatacccgcttcatggtataatccatttattgataatagccattgaaaagcccggttttacgggctttaacagccaaaaggaggataagccatgatacgctatgaccggctgtgggcaaccatggaagcccagggcatgactcagtacagactgatcaaacattacaatttcagcgcgggccagataggacggctgaaaaaaaacatgcatgtatccacccacaccctggataccctctgcacactgctgggctgtgatatcagcgatatcatagagtacatcccggaagggagtcccgccccggaggaacctcctgtccccgaagctggctccgcggaaaaggagacatcctccaaatccaggaaatccgactcccccaaaggcgataagcccaagaagtctgaacccaagaaatccgcgaaatcaaaaaagggcgataaaaaggcggccaaggaaggaaaagaggggaaaaaggggaaggaaggcaagaagaacaagtaaacattcagctatatcagcagacggactgaaattttcaatcatttcactccgtctgttgtttattttccacctttttgtgggattgtcggatttactttcccagcccaaatgctaaaattaagttatgaaaaatgtggtgcagcaaaaaaatatgtttaagggaggaatgttcatatgagaaaatttcaaaaagcaaccgcagtcatcatggcagcagccctggcagccaccggctgcagctccggcggggcaaagaccagcgacacccagcagccttccggcacagaggcagccaagacagaggcggctggagacgctgctaagacagaggcagccaaggacgctgcttccggtgaagaggagccggttctggtagtctacacggccagaagcgaggccctcaacaatgccgtgattcctgagtttgaaaaggatacgggaatcaaggtggaggtggtagtggcaggtaccggagagcttctaaagagggcccagtctgaaaaggataaccccctgggcgatatattctgggtggctgaccagaccatgctctccgcctccaaggatctgtttatggaatatgtatcgcctgaggatgaaaacatgctggatgcgttccgcaacaccaccggttatttcactcctgcatttgcggatccgacggtcatgattgtcaataaggacttaaagggcgacatgaagattgaaggctttgaggatttgttaaaccctgagttaaagggcaagattgcattcggggatcctgtaaactccagctccgcgttccagtccctgttagccatgctctacggcatgggaaaggacggagacccgttatctgacgaggcatgggcctatgtagaccagttcatcgcaaacctggacggcaagatggccaacagctccagccaggtatacaagggcgttgccgaaggcgagtatgtggtgggcctgacctgggaagacccggctgccaactatgtaaaggaaggcgctgcggttgaggtggtattccccaaagaaggggccatattccccggcgagtccgtacagattttaaaggactgcaagcatcctgaaaatgcaaagaaatttgtggactatatgctctccgagaagattcagaacgcagtgggctccaacctgactgtaaggcctctcagaaaggatgccaagctggctgactacatgacgccccagtctgaaatcaaactgtttgataactacgacgagggctgggttgctgagcacaaaacggaaattaccaacctcttcagcgagcatatggagacatccatggactaaccctttgcccgctcatctgacagaacacacagcaccggcataaccatgcccccaaaggactgcccattacgctgaccacatgattccatcaccgcccatcacctcttgggggtctgaaacggtcagctgaggcagtcctttttatctgaaaaaccaaaaaacaaggagggttacaaaccatgagtgtagctatcagcatagaaaatgtaatcaaacggttcggaaaggacaccattattaacggcctgtccttagacgtaaggcccggtgaattcttcaccctcttagggccttccggatgcggcaaaaccactctgctgcgcatgattataggattcaattccattgagggcggcgaaatcaagattgacggcaaggtcatcaacaacatccccaccaacaagaggaatatgggcatggtattccagaactacgccattttcccccacatgtcggtccgggacaatgtggccttcggccttaagaaccgcaaggtaccccaggaccagattgagtcccaggtggacgaaatccttaaagtagtaaagattgaccacctgaaaaagcggatgccctccaagctgtccggcggccagcagcagcgtgtggccctggccagagccattgtcatccacccggaggtgctgcttatggacgaacccctgtccaacctggacgccaagctgagggtggagatgagaaacgccatcaagcggatccagcagcaggtgggcatcaccaccatatatgtgacccatgaccaggaggaggccctggctgtatcggaccgcatcgcagtcatgaacggcggcgtcatccagcagattgacacccccaagaacgtgtaccagcggccctccaatatcttcgtttccaccttcatcggactgtccaacatcatggacgggcgcattgaggcaagggacgggcagacactgcttcacatcggggattacagcgtgcccatggagaacctttcccgcagcgcgcaggacggccaggccgtgaaggtatccatccgtcctgaagaattcatcatcagcctggaggacagcggcggcatacctgcggttgtgcgaagcagcgtgttcctcggcatcaccacccactactttgtggaaacagcggacggcagggagatggaggtcatacagaactccgatatctgggatatcatcccggaccacacccccatccgcctgggcgtacagccccataaaatcaacgtgttcactgaggacggcagtcaaagccttattgtcaggagggaccattcatgagatatgcaggagagaaaaaattaaatatatgggttgcaatggcactgggaatcctggccctgttccttctcttcgtggtctaccccctggtgctggtgctctataaaagcgttctttctgaggacggaaacttaagctttgcctattttactaaattcttcgcaagaaaatactactggagcaccctggtaaacagctttaaggtcaccattgtatccaccgtagtggctgccgttctggggctggccatggcctacgtgctgcggagcgtacagatcaaaggaagtaaatacctgaacatcctgattgtcatttcctacctgtccccgcctttcataggggcctatgcatggattcagctgttggggcgcaacggcttcttcaccaagatactcaacagcctctttcacataaagctgggcggcatctatgggtttgcgggcattgtgctggtattctccctccagtccttccctctggtgtatatgtacatatccggcgccctgaaaaacctggacaattccctgaacgaggcagccgaaagccttggctgcaccgcattccagagagtgatgcagatcatcgtccccctggtaatgcccaccatgctggccagctccctgctggtgttcatgcgcgtgttctctgactttggtactcccatgctcatcggcgagggctataagacctttccggtgctgatttacagccagttcatgggtgaggtcagcacggacgaccattttgccgccgcgctctgcgtcattgtcatcggcataaccctggttctcttcttcctccagcgctatctgggcagacgcttcacctactccatgaccgccttaaagcccatggtggcggaaaaatgcaccggcacacgcaacatcctgtcccatctgtttgtgtacgcagtggtgctcatcgccatcctgccccagattacagtcatcgtcacctccttcctggcaacaggcggaggaaccgtatacacaggaggcttttccctggaaaactacaggaacaccctgttctccaagaacaataacacagctattttcaacacctacctgttcggaatatgcgccattgccattgtggtggtgttcggtatcctcatatcctacctgacagtcaggaagaggtccttcctcaccggcatactggacacggtgaccatgttcccctacatcatccccggttctgtcctgggcatctccttcctgtatgcctttaacagcaagcccctgctgctcagcggcactgccattattatcatcatatccctgtccatacggcggatgccctataccatccgctccagcaccgcaatcatcggtcagatcagtcccagcgtggaggaagccgccatcagtctggggtgcaccgagacgaaatcctttgtgaaggtcacggtgcccatgatgatgtccggggtgctctccggggccattatgagctggatcaccttaatcagcgagctcagttcctccatcatcctgtataccagcaagacccagaccctgaccgtagccatctacgccgaggtcatccgcagcaacttcggcaatgccgcggcttactccaccatcctgaccctgacaagcatcctgtccctgctggtatttttcaaggtcaccggcagcaacgacatcagcatttagtctctatctatgatataataggaggtacagtgtcctgagggcactgtacttcactacttccgggaggtacccgccatggcaggcaaccagtacagggattacatcaagcgttctttccttaaatatgcatgctccattatctcactgctctttgtgctgatggggctgttcctgttcatcaatgtccagtggatcagcgtgggaagcaaccggaagaacaacgcccttctggcatccgccctggacagccaggtgtcatcctataaggaaggtttggaacacttttccacagattaccgctttttggatgccctgaaaccgggaaatgcggatgccgccacccaggtcaaccggctgctctacggttttaccacatcccagcccatacgaagcacctttgcccttacagatacagagggacacatggtaagctccagcctatttgagggaaaccgcgaaatattcctgaacagcgccgtctataagagcctggtggaaaaaatgcaggaagcccctgacctgacccataccatgcccagccgcctgaattttgcccacggacaggaaggggacctgctcatggcccgccccgtcgcagacgcagacggaatctgcggatacctgtttttcgatttgatggatgaacagatttacgaggctgtgcgggaatgtccgttagacgacgtggtcatcacagacaggtatgacaacctggtttttgcagtgggaaggcagaatgcggaccccatggaaaaatatcctgccggcaaatacaggatggactggcagaagggcaatattgtaaaggtcaacaacaagcattaccacatacacaaggaagtccttcctgagagctccctgattctgtacacactggtatccatggaattccagcgcagccttgtgacctacggcattctgtttctggggctggccggaatacttatggtcatcatgattccgcccctgaccctgcgcataaccaaaaagaacctgcaggccattgacgagctccaggcctcggtggaggaaatgaggcggggaaatatggattaccgcctgaaaagccaggtatttgacgaattccggatgctcaacgacgcgttccgcaacatggtaattcagcgcgaggagctgatgcttcacaacagcgagctggcggagcgcaagcgcaccatggaaatcaaacagctggaggaacagtttaacccccattttatcttcaatgtattggagaccctccggtatgagattgccattgactcccagaaggcttcggagatggtcatggcctttgccaacctgatgcgctacagcgtatattacgggagcaccattgtgcccctgcagaccgacatcgaatacatcaacgactatctcctgctccagaaaatgcgctataaccgcaggctcaattaccatatcgacatcccggaggaactgatggacttaatgattccaaagctgctcctgcagcctgtggtggagaattccctggtccacggaatgaaggataaacactgtgtatccgtcaccatcacggcccgtaaaaaggacagcacactggtgctgagcgtggaggacaacggcagcggcatcagcccggaaaagctgaaggagctgcgggaggccctggatcaggaggatatttacagggaacatatcggattatataattcccaccgggtggtgcggcttctctacggcccttcctacggcctgaccattgagagttcccccggaaacggaacgcgggtaagcgtcacccttcccgcggatatggaggaggatacatatgtataaggtcctgattgtggaggacgaagacatcatacgcaagggcctgctgttcatggtaaactggcaggaggcggactgtgtggtggtgggagaggcagtggacggactggagggactggaaaaaatcagggaaacaaacccggatattgtggtggtggacatcaacatgcctgtaaaggacggtctttccatgctggaggacagcatagaggagtacggctatgacgccgtcattgtgtccggctacagcgattttgaatacgccaggaaggctatccgcctgggagtaacggaatatcttttaaagccagtgaattttaacgaactctatgacgctctcagaaagattaaagacaagcagcaggcagcggccaggctcaggcatgagctgaagcagctggacatggaaaagcgtaagttaggcatactggatgaaccggaaacaggggacagtgccgaagggaaccgtcatgtggagtacatgatggactgcatccggaatcactacagtgcccacctttctcttacggatatcagcgaacagtgcggtatgtcctgcacctacttaaactccaagtttaaaagctttacaggttataccttcaacgactatctgaaccgctaccggatgcagaaggccgtggacctgctgaaggaaaataaatacaaggtctacgaaatcgcagaccttgtgggcttctcggattataaatatttcatcaaagtatttaaaaaatatgtaggatgctctccggtcaagttcatggaaagcggaggcgccggacctactccttaaaatccgcgcagagattgggccggtggatatccagcaccatgggcaggttcccctcggaaaaccgcttgtccagcgcctccatgccatactccagcttatactcaatctcttccctgtatgcaggtataaccatgtagaagtttaccttcctgccgtcctttgcctccatgctgcccatatcgccgccggtctgtaccaggaccacgccgcccattccggtatccggcgccagaggctcataatcagggccattgggaatggtgtgcccccatcccagccaggtgctgtactcatgggggaaacgggccagatacttaatcagtccgataggccagtattcctcctgcgcaatgtcgctgttgatctggcctgcctcacccggattccactcctttggaaggaacatatacagttccccgtacctgaggtcctccctgtcctgaatttcctccggcagagtcatgggcatatcgctcatgcccgtggtatacattacatagtagggatgggtttcatcgggccgcataatgttcacatcaatgtggaccaaatccgataaaagctcatggaaaacaaactcctcccggttgggaaacagtccctgaaaatgggcatttatctcctctgcgtatacgccataagcctccggcggcctccagccctcattctccttatcctcatagcggtaaattggcgaaccgccctttgacacctcatctgcttttggtcccttcttaaacagcttatccaacagtcccatctgtatcctcctatgcgtttttattcttatagtactgctgctttctcatgtacatgttcttgtccgccctgcggcacgtgctgtagagatccgcgtccgccttggggtcatagatggaatatccccaggaaaaggtaaattccggcatggatgcctccctgttaaacatgtccccgaaccgtctcataaaatcctgtatcttatcccggtccgcatccggcatcaccaccacgaactcgtcgcccccaatgcggtacatcactgcctccctggtccgcatattaagatatgcctttgaaacgcaggtaatgtagacatctccggcatcatgccccagggtatcgtttacatgcttaaggccatttaaatccagaaggataaaccctgttccctcctgggccttcccggcaatgcggtttcctatatccagctgatatgcgttccggtttttaagctgggtcaggtaatccgtatttgacatatcccggtaaaagggattggatatgcgcctgaacaacagtctggaggcgagacaggccccaaggctgaacagcaggataaacagcggaagcaggaggcgcaggctccggtaggtatcatactgatggcctgcctcgaactcgattcccaccactcccagcacctgttccccatcatatatgggcatgtaggtgataaatatttttccccattccgtgtccttaatccgatccggaagcaccttctgtccgtccagtgcccgctgcatgtccgggtaaatctcatgctcaatcaggtcccccggatagcggaagtccggctccgattgatccaggcagtcgataagatacacaaactcgccgtcctcattcatctttgcggtatagagataccggacaccggaaatctccctgatcctctggaaagcttcatgggcctgcttatagacatctccctccatatcttccctggtccgtacctggtcaaaggtgctcttatccagacgtttctccacatatccgtatatagcctctgcctggtccctcagactgatcagggtatcattgtatgtaattctgtactgaaaccaaaaaatggagaatgtcaacagggccactacaattgcagtgaatagggatacctgtatgtccactctcctccatatgctgggcttcattttgattttctccttggtcatggctgcgttccatccatctggtattattttacattatactatctggtgcatcctttgtctatttaaggatttattactttactctccaccggcaccataacctttactatatactgttcgtactccttcaccgtcagctcatccagcatcaaatcctcataccacatctggcccagccggatcccccgttcccccgcaaaggcgctgatgaggcggtagggcttttccatgtcccacaaatgccccctgctgtacagctccacatagactccctccggccggctctgaacccggcgggaggcagttttcttatccagcctggtatacaccttcacatagcggtcatatatgccccggtccatgtcctctcccaggtaaacggatcccaccgcgcccactgtgtcatggtacttttcctgcattctcacatgctccgcaatctccaccgcagccttccgctccgaccccgcgctgatgtccgacacaagcaggtattccctgtccctctccaccagccttggctcatccagagcagccttcatggccagctgcaccgactcctcctcatgaaggatgaagcgcttcatattcttaagacgccgtatctcctcgtcaatccggcgcttcttcccgtccatcatggacatgaaacgctccggggaacggttttccatatactccttgatttctcccaaagacatccccaacttctgcagggcacgaatgacctcgaacatgtccatctgccatacaaaataatacctgtatccgttctcctcctttagggccggtgaaaacaggcctatttcgtcgtagtggaacagcgtgtgtttcctgacccccagtatcctggcaaattctccggtggtaaagtatagttccgactttttttccattttcgcaaatctcctcttgactatcgggttaccctatagcatatgataatacctgcggctgaaattatcaagatccaacagtacttattttattgaatcaaaacaggagtgttaatatgagtcattcattatcaaaaaaattcaccttcgggtccctgctgctgtttgcgctgcccaccactgtcatgatggtggtgatgtccctgtacaccattgtggacggggttttcgtttcccggttcgtcagcaccaacgccctttcatcggtaaatatcgtctaccccgtgatcaacatcgtgctgggcatatccgtcatgctgtccacgggaagcaatgccattgtggcaaaaaaaatgggggaaggccggcctgacagcgccagggaaaccttcaccaccattatcctgctgaatatcataatcgggctggtctttgccgtcattgggaacctggcggccgtacccctttcccgtatgctgggagccagcgacctgcttcttaaggactgcgtcacctacctgcgctggcagctggcgtttgctccctccctcatgcttcagattcagtttcagatgttttttgtgacagagggaaagcccggcatcggattgttcctcaccctgctggcaggcattgccaacgcagtgctggactatgtgctgattgtacccatgggaatgggcattgccggtgcagccatcgccacggtaaccgggtactctattccggcccttatcggcctcatttactttgccgctgccagaaagagcctgtggttcgtacggccccgcattgtaaaaaaggagctgggagaaacctgtctcaacggttcttccgagatggtgaccaacctttcctccggcgtcatcaccttcctgttcaatctgctgatgatgcattttgcaggcgaggacggggtggccgccatcaccatcatccagtattcccagtttctgctaaatgcactgttcatgggattttcccagggcgtgtcccctgttatcagctttaactacggaagccagaaccatcagcagctcagacaggtatttaaaacctctctcattttcacggcagcttcctccctggccgttttcctcatggcccagctgggcggcagcctggtggtagagattttcgcacgcaggggcacgcctgtctatgaactggcaaggcacggattcatgatatttgcatgcagctttcttttttccggcttcaccatctttgcctccgccctgttcacagccctgtccgacggacgtatatccgccatcatttccttcgtgcgcacctttggcctgattatcaccagcctgctggtgctgccctttatcatcgggatggacggcgtgtggctggccattcccatagcagagttcggcggaatcctgctgtgtctttattttttacgcaagtacaggaccaaatatcactatgcctgattgtttaactgccccttaaaaagggggatggcccggcgctttgatacaaagcagtccgggccagcgtcatttctgacatatccagcataaaccatggagccgctctaaggtcaaggcaatttcatccatggagataattgtaaggtttcttacgaattctcacgacacccctttgataaacttggtgggagatttggaggtatactttttgaacacggagcagaaatgcttgtagtccgtaaatccggtggcctctgatatctcactgattctgtactgtctggtgcccagcatcacaatggcctgctgtaccctgtatttattgagaaagtccaggaaggtctgtcccgtgacctccttgaatttcctgctcagatagctggcgctgactcccaggtcatcggagatggattctatgctaagcttcctggcaaaatcctcccgtatggcagttatggccctggatacatactggttctccgacaaatccagctgcatgtagtactccaggtttaagttgcccccctctatctccgcctgctccatcacatgctccacctggcggctgctcacgatttcctctcccagccgttccatgatgcctgccagagcctcctcgtccacaggctttagcaggtactcgcagaccctggcctcgatggcgcgcctggcatactcaaaatccgcgtagctggtcaggagaatgctcttaaaccttacctgctccgaggctttctttatcatctctatgccgtccataaagggcatgcagatatccgttatgaccacatccggcctgtgctccagaatcttctcatatccgtcctggccgtcggcagcctccgccactaccacgcagtccatggacagccagtccgtggtatagaccagcccctttcgtatcatctcttcatcttccgcaatcaacacacgcaacatccgtctgattcctctcttttcaccggcagggtcaccaccagggtagtgccgtggccctccgcgcttctgatctccaccccgtaggggcgtccgtacaggatatcaattcttctgtgaatgttatacagtcccgaatgccttctgggattttccttctgctccagcagggctgtcagctcgcttagggttccctgtgggattcccaccccgtcgtcacggcatatcatgatcagctttccctcatggatataggctttcagctccacagtcaggttgagctgctttccaaacccgtatttcaccgcattctcaatcatgggctggagcaccagcttgggaatccgcaggtccatggcttccggctccacgtcaatcctgcaccggaaccgctccccgaacctgcgctttaatatggtcagataggattccaggtgctccaagtcctcctttagcgtcacctctgccttgctgccgtccagactgtagcgcagaaggtttgacagactgaagaccatccgctccgctgttgccggctccagcttgcacatgtaccggatgttctccagggtattgtacaggaaatggggattgaactgggattccagctgcttgttctgggccatggacaccagctccgccatctttttgttgttctccatctggattctcaggctctgtatggtctcgttataggcgtcggcaatgattttgaactcattgtcgctctgtatccgtataacgccttccagatccccgtccctggcattctccatcacatccaggattttatagaaatcctctgtctttttctccgtcaccttcctggagttgagaagcatccacagggtcatgagcaccagggccgtgatgaccaggccgctgcccaggcccagggaaatgacgatgttctggatatcggagatggaatacacggtaaacccgcccctgggaacctgctgcctggataccaggtacatctgtttctcatggtttaaataccggcccgactccctgaggacctttatgacctggttgctgctgtttaagaagctgtaattactgctgacataagcccagccaaagggatcggcgataatggtctgtatatccggcttgtccacaagggccttaaactggctgctgggaatggaacacaggatatatcccagtttccggttcccgtccatcacgctccggcctatggcaatcgtactgtcgccgctcttccatccttctgccagcctgagagccgtcttatggggctcccggtccatatcgtcaaatatcccccaggacacatcctccggcacatccaggaactgggggaggtcactccggctggacagaagaatgttcctgctgctgtccatgacaaacaaatccccctccagtcccagactgttagtgatgccgtaaaatatcccaaacagctcagccttcccgtccggatcgcggatgttgtcaaagcagccgggctgcgaagccatttcctccacgcccccctcatagcgggccagcacattgtccagcaatcctgccacataccggttgtgctcaatattgccgctccttttcccgtgaagcagcacggtcatgaaaagcatgccgcataccatggtaaatatgaccgccgggacaatggcgtaggcgataaacatgcgctccagctcgtggcggaaataccgttccttcttcactggcttcccacctccccggacatgcccccatcctcctcaagcactctgctgtaaatagaggcaaaatgctccagccacatcccttttctggaattcacctcgtcctccctgctgtatatgatgtggatgtcctccttatccggcagataggaaggttcctccacatccattctcacagaacggcggtccagcctcatggagataacggtctgtgcatccctgcccgtgacaaagtccacaaactccctggcctccttcatatggcggctgccctttacgatgcagacgctgtccggcgtggagataaccccctccttcatatacaccagctttaccggtcccctgtccgccacatagtgggcggccgcctcctcaaaggtcaggcccacggcgtattttccctgggccaccccctgatacacctccccggaaccgcctaacagaatgccgtccaggttccggcagaagtcctccacgtaatcccagccctgctccggctccccgtcccccatcgcatagagcatattgataagatgctcataggccgaggacgacgtggcaggatcgcacatggcgattctgcctttcagctccggctgtaacaaatcctcatagccctccaccttcacatccccaatcaggtttgtatttaccatgattacactgggaatatccgtgaaccggctcatattgccttccctgttcttaaactcatcccgcaccatatcctcattgcagcttatgtacgcctcaaacagctccctcttgggactggtggtggacagggaacctccccagaatatatcgcagggaggatcgctcccctcctccgccatcttaagcagctcccctgtgcctccggtctggacatagacccgtattccggtccgcccctcaaattcagccacaatggggttgatgaactcaaggggatgggggcagtaaatcaccagctcctcatcccctgcatggtccctgccagccccatgctccgtgcctgccccagagtccgtgccagccccatgctccgtgcttgctgcacgatccgcacctgccctatggcccgcagccgcagaagtcccgctgcctgcgcagccggccaggcagagggacattcctatcactgcaatatatatgctccaactctttttcatacgcatccgattcctcatactgcctattgtaccaatgcgtctacaggatgtaaacccccttgggatcgaaatccaggtatgccttctcccctacctcgtatatcctgcggtttacaggattgtaatccgtaatctgaatctccatgttccccaccatgacctgataatactgataggatcccataaaggtggacaaggtgacagtgccttccaaaagcccctgctccgccagggtggctccctcaggccggataaccagcaccgcgtcatcccccggccctgcctttgcgaaattgttcaccgtaagctcctgacccaccacgtcgatgaccgctttttcaccgcttgcggacctgaccctggcctccaggaaattagcttccccgataaagtccgccacgaacctggagttgggatggtagtaaatctccctgggggtcccaatctgctccacctttcccttgctcatgataatgattttatcggaaatactcatggcctcggactggtcatgggtcacgtagatggccgtaatgcctaccttctgctggattttgcggatttccgtcctcatggtgaccctcagcttggcgtccagattgcttaatggttcgtcaaagagcagtacgctgggctcaatgacaagggccctggccagggccacacgctgctgctggccgccggaaagctggttggtcatacgtgactccatgccctccatctccaccagcttaaggatgttcatgactctctcatgaatctcctccttggggagcttgcgtatcttaaggccataggccacattgtcaaatacattgtaatggggcagaagggcatagctctggaacaccatggccgtatccctcttattgggtgtcagggcattgatagcctcatcccccaggtagatatccccctcatccgggctctcaaatcccgcaatcatgcgcagggtagtggtcttgccgcacccggaaggccccaggagtgtcacgaagcttccgggctcgatatccagggtggtatcctgcaccgcatagaattcctttcctgtctttggatctgtatatattttggaaatgtgttccagacgaacaccctttttctgtttctccatatcaactttcctccttgctatgagcacttggcgtctgtcttttagacgcttacgtgcgatgcatgccactggcgctttgcgggcatcctttgaccgcttagcgcagcgtcccgctatgagcgcttaattctcctgctttatcttcctgctgactccaaagaacttcatcagtgtattcatgataagcaccgcgccgtaggttatgataatcagaacggttgcataggcgcatgccacgccgtaatttcccttctcggcctgctcattgatctggcaggtgatgagcaggaaatcaggcgttaccagaagaatgatggcggaaattgccgtgatgctccgcacaaaggcagtcaccagcccgctgaaaaaggaatccttaatcaggggaagggttacggtcataaacaccttggcagagttagcgcccatatcgtaggctgattcctcgatggacttgtctatctggcgcagggctgagataccgctcctggtgccggtgggaaggcttcgcacaatgaatacgataatcaggatcaggccggtgccgtaaaggccgctcatgacgccggtcctgaacagaccgttggcataacccctgatatatccgatacccagcacggtgccgggaaccgccatggccagcatggatacaaattcgatgaaccctttggccttaaaccgtttctttaccaccagataagagatgaccatggacaggaaagctgtcaggggagccgcaatcagggacaggacaaaggagtccttaaaagccttaagtccgctggtcttaaacatatattggaaccatttaaggctcaggctgtaatccctgccccagagggtaaacagcgcgccaaagggcaccataatgtacatcagcatgacaaaggctgacacggcgccgcagaaaaaggtcaggggaaccgtaacgctcttatcctctatgagcatcctcatacgggaagcttttcccgtaagggtggctgcggttttcttctcaaggtaatacttctggatcaggaacaggaccacggtcagggataaaagcaccacggacatggcagcggctccggtggagtcataggcccctgttacctgcaggtaaatggtggtggccagtgtgtcgtaggaacctccaatcagcatggggttggcaaaatccgccacggactcgataaaggttaccaggaatgcattgcccagtccgggaaggagaagggggaatgtgacgctggtaaacaccttccaccgggaggctcccatgtccctggttgcctcctccagggaggggtcgatattcttaaggagtcccttaagcatcagatagcatacagggaaaaaggtcagtgtctgcacaatggcgattcccttaagcccatatacattggaatcatagattcccaaaagggagcgggtgatgatgccgcttcgtccgaacagcataatcatggacagagacagcacaaaaggaggagaaacaacgggaagcatggaaaccatggcaaacagcttctcaagcacctttgtcttaagctttacatacacctccacataggcaaacagcaggccgatggcagtggatgcgattcctgtaatcatgcctaacaccagggtgtttttgaaagccttctggaaccgctccaggctcagcaccctcccgaatacctccagggtaatcttaccttccgaataaaagctgtctaccagcagcatcagaagggggtacaggataaacaatgccaggaataccagcagtaccacaatcatactcaccagtatggggtctgaaaaaaatttcttgcgctccagctcagcgctctgttttctggccacaatgaggccccctttcccgaggaattctttcctcttgatttctttcctctctgtttcttatgatcccttttgccgaaccaggaccataatgtaacaaatgctgcgtaatgaatgatgtcaaccattacgcagcacccgtttgcaggcttacactacattacgtttccaagtgccggacaccggcagaagctctgcctattctgtcaagaaacggctggagtccgcgctgtcggaggagcttccaagagctgcgaagaagtcctctacatacttggcactgttttcctttgcatcctcaaaatcatagtcaatggtattgttcatatccagaccaaatttcgtagcttcctccggctgggtggcattgcttaataccaggaactgataggatccattctccttggcgtggtccacacagtcaggagacagggcgtattcaatccacagcttggctgcgtttggatgtgcgcatccgttgaagatggcggtagcgcccacctcaaaggaggtgccgtcctcaggaacgattaactggatattgtcatagccctgaagaatctggtaaatgccgtcatgaaggaaaccgattccgattacgcactcgcccgggcctaccatcttggatgggccggaaccggacttggtatactgggaaatgttcttgtccagggccttgaaatattccatggcctcatcgtgtcccttcatctgaaccatggtgttgatgagcagttttgccgtgccggccgtgttggggttggacagcatgataagtcccttgtactcttccttggtaaggtcatcccatgttttgggagcttccaggcccagacggtccagttcttccgtattgaccatgaagcccaggattcccttatagataccataccagcagttggtcggatccttgtactggtcaccgatcaggttcttggcattgatggcattgtactccatcagaagaccgtcagccactgcctcgttataggggtctgtggttccgccgaaccatacgtcggcagacggcttgcctgcttcctcggatatcttggtataaacctctgatgtggaaagtctctggtattttgtcttgattccgtacagcttctcgaaattctggcaggcagcagacaggtattcctcctcgcaggagccgtataccgtcagttcgccttccgccttggctgcctcgatgagggcgtccatgtccccgcccgcagcctcagctgctgtggtttctgccgcgtcctccttgctctcttcctttgcagcctccgaagctgctgccgtggtggtctcaggcgcggccgtggtttccgccggcttgctgccgcctccgcaggcagtaaggcttaaagccatggagcatgccaacaaaagtgccagttttttcttcataataataccctccttctcatttctgatgatttcatcatagcagaaaagaaggagggtaaaaaccgctttttaagtaattttgtcgtaatttctgaacatgccttctgtttttttatctaatatccacaaccttatccgtttacagacatgcatccagcattctcagcagttcctccacacgaatgggcttggacaggtgtccgttcatgccgctgtccagggacttcctgctgtcctgatcaaaggcattggctgtcatggcgataatgggaatggttctggaatccggccgctccatggtgcggatacgtctggtagcctcgattccgtccatcacaggcatgcgtatatccatgagcaccgcgttataatatcccggttcatgatttccgaaggcatccagggcagcctgcccattttccgctgtctccaccagaaagccctccatctccagaagcgactgtgcaatctcctggtttaacaggttatcctccacaaccagcaaacgcttgccgtggaaatcatggtgctccggctctctgctgcggggcctctgcccgtccagctttccaatgggcagagtcagggtaaaatagaactccgatccctctcccaggacgcttcgtactcccagcgtgcctcccatcatctggaccaggcggctggaaatagcaagccccagcccggttcccccgtatttgacagaagtgtttttctccgcctgctcaaaggcattgaaaatgctgtccatagcttctgaagcaatgccgattcccgtgtcctttacggaaaatgtgagacgctggccgccggagcttccttcctccggtgtgatggaaaatatcacgtcccctccctctcctgtaaacttgacggcatttccgataatattaatcagcacctgttccagccgcaggcggtccgtcacaagagccagtccctgacagcatctgttttccacaataaaccgcagccccttctgctctgcctggggccgcatcatgccctccagggatctgacgaaatcctccatgtccatggactgcacattcaactccatctttccgctctcaatgcgggacatgtccaggatatcattgataaggctgatgagatactggttggatgtctctaatttatccaggcactccagcacccggtccctgtcatccaccacatttctggctatggaggtcatgcccactatggcgttaagcggcgtgcgtatctcatggctcatccgcgacaggaaatccgtcttggcctggcttacggcatccgccctggctttcatcacaaaggacggaatgattttgctcagctcctccaaaagcttcctctgctcgtcgttccagctgtatccgtccgtcttcacctcaaagctcagaatgccggcaaacatgccctggttccatatggctgcctggagacagctcatggacgactcatcatagacagcgtgtctgttcaggcctgacgggtcaaattgaccgggccactgctcatactgctcccttgtaatgtaaaaggtcttatgcatcatcagatctgtcttatccctggcccactggtagctgaagcggcaggtcagataatcacggtccacatccagaagtgacacccggtccaggccgaacgtcttgcccagcctggcaaagagcagctgcaccgcgtcgtttaaatttcttgcctttcccagaaggtccagggcaaaggagaccaggtcctccctctgctcggtcaggccctgctctatggtattgagctggtgtttctccgtataaaggtccgtcagcatctcccccagctcgttggaggtgtccagataacaggccgcattgccctgacagttttccttcacatatttaagagtgctctccgcacaccggtacaggccgctgtactcgtccaccacctcggtggcgcacatgccgatgctgaccgatatgctgatgtccttgtccgactgaagcaacagctcccggaccctggccgcgacgcggggacctgtcaccgttgccccggcctttcccctgccctttaacaccagcatgaactcgtcgccgcccatacgcacccttatatcatccggctccgtctcagcccgcaggatatcggccacctcctggagaacggcattggcaaaggcaacgccttcctcctggttgatgcgggtaaagttatccatgtccagaagcatgagggcgcagcgctctcccaggggtttttgggccatatactcctgggctatcctggtcccggcctccctgttccacagtccggtcagtaaatccttggatttggcctcctccaaagccaaagccatggtctgttcctttgtaatgtcctctatgattcccagaacggttccgttctgtccgttttctccgtattccaccgcggacatggtcacccggcaccaggaatccttgacagtcagaaactgggcggaggcagttcgttttccgctgtggatgtcctcgtacatccggataaaatccctgcggcctccagggaccaccatctcctgtgcaaagctgtccggcatattcacataccggctgccgcactggtaccgggcgctggtcctgtccggaatgacgcaggtccgccggtccgggtaatagtaaaactcgcacagggatgtgtgctccaaagccatattcagtatggcgctgtttgcctcggccagctccttaagctgctggttctggtgttcggtgcgcttgcggatgtcaatgtccagaaatacgctctgggcaatcagctccccgtccccgtcctctaccatctccagttttcccagtatccaacaggacgttccgtctttctggcggacacggtactggaaattcatgctgtcgcctgccttttccagattgtccagctggtccagcttcatctggtaatccgcttcggcaatcagctccttccattgccagactccgtgggaccagaactcctccggctcatatcccagaatccgtatgctctcccggttggcattcttaaacaccacacgttcccggtccagcggcttccactgcatgatgccgcacagaaccgactggaacagctggtcgtaccggctggcttggcgttccttttcccggttctcctgtttcagccgctcctcggcctccgcctcggcggaaatatcccggaccacgctcaggcagatatctcttccatcctctgcctgggcaaaattcccggtctcatatacatggatataccggccgttctttttccggatgcggtagcgcaccccataatcccggactttgccaaaggcgtcccggaccaccccgtacaccctttcccggtcctggggatggatgcagttacccaccatgccctgactgtcctggctgaactcttcatatgtatatcccagacagtccagcatcctgtcattgacatagtacagcggaaagcccggttcaaagtaggtgcccagcatacctcctgggatagtcttccccagcagctccagggcgcttctgcccatgcggcgggcatactcctcacttacggattccgcaaaggaaaggggaaagaattcaccctcctcctgaaaatcagcgggtacggacgcgtggatggaagacactttaaaaccttccgctgtgcggacacaggtggatgtaacgcgcacgcccatggcaaagttctcgccgtcgggaagtatgcgcaccacagtaagcctgccctgcatgacggcgcagtcaggggtgaggctgttctcccttatatcctcccatataagccggtaggcgtccgggtccagtgaaaactcctgttccagtgcttcaagtacctgttcctttccgcaggaatactcacccttgccagtgccaatccactgtacatcatccatcagccagtcaagcgtggcttccacattccggtttaccatgtattccttaaaaaaggccctggtggtattttccgcatcccgcggttgtttccccatcttcctagtcctccccttagactgcagcaggcagccgtttgcgtgtattgtttcaatatataaaaacattctaacacattcctgttaaaataaaaaggagaataccattcccctttttaatactgtctttttaataccacccgcttttaccccctcttccttttcactgtcacgtaaaagcagttcattccgtccttatactccactccaatcctggccctgtggcttctggctgtctctgccgctatggccagtcccaggccataaccacttgtgctgcttctggcgctgtcgtccctgtaaaacctcctgaaaatcaatgtgcgcttatcctcaggtatgggttctccctggctgcacacccacagcctggccctgctgcggcctgtcttctccagccttatctgcgcccgtcccctgggtacgcagtatttaaccgcgttgtccatcagggccttaatcagctgccccatccggcaggggtttcccatcatcagcacatcatcttctatgtcatactccagaaccttttcctcctggtaaaacacaggttcaaaggtcagtatcttctccataaccagctcgcttaagctgaaccgggtaaattctcccttccccggtacataggaatcgttcctggccagaagcaggagactttccaccagggcgcgcatttccctgcactcctggtttacatgctccatccacttgtccgcctctgccgatatgcctgcataccgctcctgtaaaagctctgcattggccgtaatcacggtcagcggcgtttttagctcatgggaagcatccgccacgaactgcttctgcatgcggacagactcctccaccggctttacggcccaccgggaaaagaaataggacagcgcgaagaacccaagccacacagccacacaggccattccgccgtatttcatgatcccgtttctcagtgaatcctcataggtggtatctgcaaatgcgatcatataaccggccggctggctgattcttaaatacctcagatggtatgcgtccagtattcccatgtcctcctccccgttcatgcccaggacagccatctgctccaggaattccggttcccagtaagcaccatatccttccttcagcgacaccacaccgtcctcccccaccagaacagtgaaatacggcattcgtaccggcggcatggcagcaaatatcagggactgttcctcccctgataccaccctggacagcgccaggctcccctggtcatttaccctgtgcttcaccacagaggtcactgcgcagaaggttattcctatgaccgctgtcaccaccagcatattgtaaatgataaacttaagccgaagcctgcctatttccctcatcacagcacctccctgccgtccttttccactatcctgtatcccagcttgcgtatggtgacaatcatcacatccgccttgaggaaatccagcttctttctcaaaaaagatatgtaaatctccacattgttctccactgcctccgcgtcatttccccatactttggacaaaagggtgtccttggaaaccaccatatcccggttcaccatcagaatacgcatgatgtcatattcctttttgcccagctgtatgcttttgtgcggccctcttaaggtgtagtccgcctggcttaaggatacatttcccaggttcaggttttcgggtatcatctcccccctgcgccttaaaatggtcttcatgacagccagcagctcctgcatgtcaaagggcttggtcaaataataatcagctccgctttccagccccgtcaccctgtcctccagttcgcttttcgctgtcagtatcagtaccggaacctggcaccccatttttctggcctcccgcagcagggtgattccgtccattccgggcagcatcaggtccaggacagctgcgtcatagccgccgtcctttaacagccagcagccggtattgccgtccccgcagatatcgcagtcataccaatgctttaatatgtcacggatggactcagccagccgtctgttatcctccacaatcaaaactctcatctatatccactccctgtgttgcgccatgtctgaaaaatccacctgtattctctcgcaattctgtatgaaccgcaagagaacagaggtggatttcacagataattcacaaacctgtaccactcttttacctgctgcgtatctcccttctcataaagctgatgtaggaagcggcgaacaccacggccgtcagcgccagcaggcctgtcagatggggccataccagcaggcagctctgtcccagtgacagataaccgctgatggcgcccgacagctgctggggcaggatgatattggtggaccgcaccatgggattcatgatggtggaaaccgcctcactgtaaaggtaataaggcgacaagcggttcaggctcatctggcagctgtaattatccagaatctgccctgccgatgcagcctgccccatgggatacagggcattggcaacaatgctcaccaccagggtcataaacagcgcgaagaaaatccacagcgcaatcacaatcatagctgatgtggctgcatggcggcacagcacggaacagaggatagacagcgccagccagaagcagatatacacagaggtaaaaaacagcagcaccagcacccttcccgcttcctcggcagaaggcggcaccccggtggccaaaagtcccacagaacctgcgatgagtcccatggaaaagaccatgaggaagatgattgtggcgcctgccaggaatttcccgtttataactgcatcgcggtaaataggctgcgccaccagacggttaagcgtaccctcggagcgttcgctgttgatggcgtcaaatcccaggctcagccccacaaaaggtcccagcagagcaataaaagaggtaaaggacgggatggagcttccgcttaaggtgaacagcttcaggaaaatgtagctggaatcagacgcaaccgcatccgaaaggccggtcagcgccccgtatatgctggcgcagctggtcaacagtatcagtcccagcacaatcaggaaccgtttgctgcgtatgtggtccgacatctcctttcggtacaaggccgccatgccgcccatgccattacacggtcttatctgtgtacctttgtctggcatattcttaccgctgttccctgccgaaagaaaggaatcctttatttttcttttgattgagaccaccatttttctgctctcctttctcaaaatatctgcggtaaatttcatccaggtcatttccccgctgtcttaagtggcgcagggtatagcctttttccagggccctgcggtttaactccctgcacaggtctgacctggaatggaccacatagaaatcgccggtccgctccacctgctccacattgccaaggctccttagcagttcctcgaatccgctgtcatcgggaaaagcagctgcctccagggcataatgcccttcacggcgcatctgccctgccagctcgtcaatccttccgcaggcaatgagcctgccgtccacaaacagccccacccggtcgcaaatctgctgaatctgataaagctggtgggatgatatgagaatggtccttttatcatcctccgccaggctgcgtatcagggtcatcagctcccgcattccttccgggtcgattcccagggtgggctcatccatgatgaccaccttcgggtccttcatcaggacatcggcaattcccagacgctgtctcattccccgtgaataggttcccgccttctggtcggctgcctccgtcatgcccaccttttccagaagctcctccatccggcggtctgtcacatcactgggcagtccgtttagctgccctgtaaaccgcaggttctcccgtcctgtcatgtcggagtaaaaccccacattatccggcagataccccaccatccgcttgacgtcgatggcctgtctggcgcagtccttcccgtctatgtacgcactgccgcccgtgggctcggtcagccctaacagcataagggtggtggtggtttttccggctccgtttggtcccagcagcccgaatatttccccccgccagatttccagtgtcaaatcacagaccgcttccttctccccgtaggatttggacaggtgttcggtccgtatcatcatttcttcctcataatccataacaatgacccctttccagccaactatccatacaagctaccttctgccgtatttgcggaacacatagcccaggcctccggccgtacacaggatgatgacaactgccaccacaccccagattgtcgtggtcttaactgataccctgaaatcagcgtttgactgggtctgctcgcaggatgccgtaaacgtgttcacatagtcccctgtgattgcttccgaagaaggctttacatgggcaataacttctgtggtgcttcctgcgggaatggacgggatcatgttgttctccgtattgtaggtcacggtccagccggtgggcagggatgagttaagcgtcacattctccagatccacgttgcctgtattggtaatgttaagcgtcacatccgaggaccggcccgcataggcgtcaaagctcaggcggccgtccggggtggaaaccttaaggccgtagctgcctgtaataaccaccttcaggctggtgtcaagggtctcctccgccgatacagcactgcaggatatgtcatattcccctgccgcaaccccctcaggcggcgtcaccgaaactgtcatacccttgctggcgccggactccacctccagggcagccaccttggctgtctcaccggtgggggtaaagcttacgccccagccggagggtgcattggatgataagctgtaggactgcgtcttaagtccattgttaatcagtgtggtgctgaaagagaaactggtccccgtggttccctcctgctgggggtattccgaggtaaagcttccctttcccgcattcatctcatttaccataaacgagacgggcagactggctgtgagaccctcgcccgcagacgcctttacctccaccgtgtaagtcccctctgtcagctcctttggaaccgtcacatgaagggtcacctgggctccctcttctccgttctttacatggacgcggctcacctgatagctgccgccctggagatatccctcccatccctcaggcatggcagtgatctccaaatccgcattcagactggcccctgtgtagttctccagtgtgacaggaatattcaggttgtctcccggctttaccgatattcccggatagtccgtattcaggtccagaccgccggctccgtaaaccgtatgcgtacccatgaataccaggaatacggccgccataaggacggccagaaccccaaaccgcttacctgttccatcccttctgattaccattgcttcctccataatttcctccttttgcccaatggggcatctgtattttctaccagttatcataacgttgaaacctttagccaacctttaataagtttgaaaatactgtgaaaagatcaggggaagcaggattcttacctgtacgcaaaaaaaggagccgcgcggtttaataaacgcagctccttatgtacagcctgtcaatccgtctccattgccgtctctctgtttcattcagacggcttcactaaacgcctgcctccctgccgcctacagcagtacagaacatgacgaacgccccatatattcttttaccgccaggttggccttttccacggtccgctcctcgtccacgcggaccagccttccctcctttacaacgatttccccgttcaccaccgtgtaatccacactgcccttaagccctacggtacacagcatggatttggggtcaaactgggcgccggtcagttccatccggttcatgtccaccaggaagaagtctgccgccattcccactgctatctgtcccaggtcatcccttcccagcacgcgggcgctccccctggtcgctatcttcaggatgtcataagcagacggcgcctgccggctccaccagagccggtgaagcagataggccacccgcatctcctccagaaggttggagccgtcattgctggcagaaccgtccacagccagccccaggggcactccaagctccagcatcttaggcaccagcgcaacgccggaagataacttcatattggatatagggcaatgtgctaccccggtcccggtctcagccagccgtttcagttcatcctcagtaaaatggattccatgggcaaaccacacatcctcccccatccatcccaggctctccatgtactccaggggccgcatcccgaaacgctccgttgtgaaccgttcctcgtcctttgtctcagccagatgggtgtggagcctgactcccagctctctggccagctgtgccgattcctttaaaagcgtcccagtcacgctgaaaggggagcagggtgccaacgccacctggtgcatggaatacctgcttttgtcgtgaaatttcttcacggcccgttctgaatccttcagaatctggtccacggtctgcaccacgctgtccggaggcagtccgccgtccttcacgctcaaatccatactccctctggtggcatggaaacggatccccagggcatctgctgccccgaactgggcatccagcaatccgtccccggctgacccgggaaacacatagtggtggtccagacaggtggtgcagcctgttttcaacagctctcccatgcctgtaagcgcactgtaacagaccacgtcctcatccacgtgcttccatatctcatataatgttttcagccatggaaataactccatgttctgtacctgcggtaaattgcggctgaacgtctgatataaatgatggtgtgtattgataagtccgggatacatccccatattagatgcgtcaatcacatcctccgctgttcctgattcctgtgttcctgcttcctgtccgattccggcaatgactccgtcccggatgaacacatccacaccgtcaagcagtctgtcatccccgtcacatgtaacaagatgcttaacgttctttacgagtaaggttcctttcatgattacctcctgatgtaaattcataaacaatctttgcttcatagactatatgactggtatactgccggcggcacgggtgtccacgatgcatccatacggattcagtatccgtgatactaaacgtatgcccgtggtcccagctatgttttaaacagcgatatagatatgattttttcaaagaacaattgatactctaacaatataacagtcatttaaaaggaaatcaatatctaatgcggccaatcttcctgcagatattttatgcacatccaacaatgcaggcggatgatgtcagagtgtgtctgaacattctttcccgctatccgcacgcccctgatattcgctttttatgatttcatacatatcttccgggctttctttgcagccgttttgaagccataatttgataatttttgtgattccgcttttaaaaaattccatgtgatattcaataaaacgattctcaaaatgctgccgtgcaaggttaatatcgtaagtaataatcttatagctgtcgtcataccccagtttgaaataggtcttatagaatatctggttatcctttatgtggcggaacaatttaagataatcgttactgttgaatccccgggtgatttcattttggtacaggtcagataagttatgttccagcttgtcccgtatagagtcagccaatccgtaaatatccgtataatttgcataaaaagtcgtgcggtttaatccggccagcttacaaatatccgatacactgatttcatttagctcgttagtctgaagcaaactgataaaaaccttttcaatccgttcaatggactctttcttccgtttgttattgggtgtattcataaaatcccctttatctcaacacttgtcccgttattggtgattgttttttgttttataaatgcattatactatatccagattaaaccaacaagcgttgatttaataaaaataaaggaggtactttacatgaaaaaaagtagttttgccgcaatgatatcaggaaccgtaagcggggtgcttttcgctctcggcatgtgtatggctcttatcccggagtggggggctttcaaaccagggcttgccttaggaagtgctggtctggcgctggctttgattacagtgcttatatggagaagaatggagcataaagagcctgtccgattttcaggaaaggtgatcttgtcaattgtgataggaattgccggtgcaatggcgtttggagttgggatgtgctttagcatgatatggggtaaaatgactgccgggattgtaattggccttgccggaattgtaattctgctttgcttaattccactggctataggcataaaagaatgaaatcaggccggataattcccccgctattgctcttaatcatttgtactcttaattactgcagatttgtatggcagagaaatatgaaaagaaaggataataatttatggcagcatcaaaacttgtaaaaacaaatgaaaaaatcgctgaagcacttacggaagtctttttcaacattgagcacagtgtagtagacagatacaccaaaattgaagatacctttgtagaaacctatcttgtaaaagaaggcgaaacaacagccgaagccaaagaacggctgctgcaggaacgggcacagcgggaacgggcacagcgggaacgggcacagcgggaaggctgatgaacagtgtgtttaacggcgttttccagtttatgctgtaaaatgtttacaggtcatgttctgaccaaaatcctgcctgactcccatcctgatttcataaaaacccgaggcacaatataagattagatgaaacaacttgacagattcctcattaaaatttagagtataaagaacaggaatatacccatcagggaatgattgttattcttaaaaagaacagcggcagccagggcaacgtaatatacgctttgcggtgttccacatttatgaccacttattacatttttgtatgtatatttctttcgttatctgagtcttattagctctaattatttattcaaacaagccatctaaccttggggcacaatatgagaatagataaaggcaccagacagaacccacattaaaattcagaacataagaaacacgaatatccgcctttggcggataaggcggaggacataccaaacctggagaaagacttaaactgttcttatccggcagagccaatggaggggctttttctgaaaatcgtaaaaggacaattagaaaaaacagaaaagaatcctaacgattacttatggcatagcttttgattcctaatccgcaatcgtgaccgggctgtggctggctctgccgattttaaggatattccgaatagtaaacgcattttgcagcgctgcggttttgttgaacgcttgaaaataatttatattttgaggaggttttgcatgagcaattcagttatatttagtcccggcacgttttttcatggaaccagagcggatttaagcgtgggggatctgttggtgccggggtatttatctaattatgatgaaaacagggttgccaactatgtttattttacagggaccttggacgctgccatctggggagcagagctggcttcgggagatggaaagcagcggatttttgttgtggagccaacgggagaatttgaagacgacccaaatgtaacggataagaaatttcccgggaacccgacaaagtcataccgaacaacccagccgttaaaaattgttgctgaagctatgggatggaaaggacattcaccggaagtattgcagggtatgcgcgatcatttgaaacagttagatgagatgggaattaaagctgtcgaataaaatattatccttggaccggtttatgggtctgtcccagatttaaaaaataatcatcctaaaagcccggcaaggcctgccccttagaggcagcccttgccgggctttataaaaatcagattacatacttgtaccataaatcatatttggcaggaacagcaccagatccgggaagaatacgcagatagccagcgtggccataatagctatgaacaacggcagcgaatacttcgtggtctcctgcaccgagcagtccatgatattggaacaggtgtataacgcaactccaacaggaggcgtggaacagcccatggtaacaatggtcatcatgatgatgccgaagtgaaccgggtcaattccgtactgtgtgataatcggaatcagtatgggggtaacgatcagggtgatgaccgttgtctccatgaacataccaaacacagtcagcataattaaaatcagcagcagaagcacatatttattgctggtcagacctaccagcaaagtggtcagggtctttggtagctggtcaaatacaacgccgtagctgaatatgccggagaaggccagaatcatggtaatcacggataaatccttaacactgtccacgatacacttcttaaacttctcaaggttcagttccttataaatgaagatacctacgaacagtgcgtagaatacggcaaaggcaccggattccgacggggtcatgacaccgaaacgaatcagcacaatcagcaggattgggaacataagcgcccatatactctcaaaacaggacttgatgataacccctggaggtgacggcttgtcatggtcaggctgatatccgtagtggcgcgcggaccaggatgtggcaatcatcatgaagatacacataatgatgcctggaaggaatccggctacgaacaggcggccaatggaaacctcacccacagtgccgtacagaatcaggcccatggaaggcggaatcgtggctacaatcagtcctgacagacagttgattgcagcggcccagcccggcgcgtagcctctctttgtcatctcaggcccaaggatacggcattccatggctgcatctgcaactgcggaaccggatacgccgcccatcagggttgagagaaccacggaaacctgtccaatggaaccgtacatatggccggtcagcacgtttgccagctttaccagacgtgatgtgatacctgtgttgttcatcaggttgccggcaaaaataaacagcggaatcgcgagcatggtaaaggactgggtggtggacagggatttctgcaccagaatcgtccacggaatctcaggcctcatcaggaagaaggaaaatccggatactgcaatggcaaaggccaccggcattccgaggaacaggagtattaagaaaaatccaacagcacttaacattaattaaccccccattctttcattggtttcctgatatcaccgagcatctttccaatcatgctgaaaaacatcagcagggagcccaccggtactgccagagtacaccaggcatagctcatcttcagggtattaaaggtacggttccagctctgggataccagcaggaatccgtaaacaatcagtatcaataaaaacagcagcatgaaaacgtcaaacaccagcatcagagtcttctggaccgccttggggaaccggttggacagcatgtcgattcgaatcaggccgccgctcttgatgatgatatcagagccgataaaggtcagccatccaaatgccagcagcgaaacatcctgagcccagttcaccggcattccgatggttctggccactgcggaccagaacaccagaacggcaatcatgcataacattgcaccggccagaagctcctctgtctttaaaataacagcagaaatttttttcatttaaaagcttcctttctgtattgcggaatgtaccttggaattagttggtcttaccaatctccttgtacagtttatctctcagttcagcatagccaagtttctcatatacaggatcaacggctgccttaaatggagcaaggtcaggctctacgatggtcattcctgcttcaaccattgccttctcagcctcgtcagcctctgtcattacgtcagcagctgtttcctggccaacctcgatggaggtctcaaccagcagtgtctgcaaatcttccggcaggctctcaaaccagctctggccgcagattaatccctgcatcagctggaagtgtcctgtcttggactgatatttgcacacttcatacagtctggatggatatgtagatgtgttctgtgcctcgcagccctccagtgccttggactggattccgttgtaaacctcgccccatgacatggaaataggagtagcgcccatggcctggatggtctcggtacatacttcctgtccgatggtacggattctcatgccctttaagtcctctggcgtgttgattggcttgtttgtcataaaatgacgcgggccgtcgtagaatgtaaaggacaggattttaattccatggtccttggacagggaatctgtccagcccttaaatgtatcggtctgtgttatcttatagcactcctcgtagttatctgcaaagtaacccatcatcagaatggagaaatccttcacatactgtcccatacgggaagcatctgtgttaactgcaacattagcgccctggatggcctgctccagcacatcctcgtcactgccaagctggccggacgggaacacacttaccttcagcctgccgcctgatttctcatttaacacatcagccagcttctggtagttcctggtaatcagggcctgctctgtctgggaagttgaaatctttaactcatataccttgtcatcgcctgcagcagtctcactgctgtccccttcctttgcctgggttgcagctggctgggcatttcccatacccggcatgccgttacatgccgtaactgccatcattgctgcggtaagaacacctgctaataatactctctttttcattgttatcccctttccttacgttgtccagcgtaacagctttcgctaaacgtttacatattttcctcatttagtataaacgtttacatattttccatcaagtagtttctgcaaaaaagtttaacagaattttaacgttatttttatgcaatattcacaattcgacttattttttaaaagttcctgttttttttctgctttcattttgacattatttcaagaaacctttacaataactgtgtatacattttcagtgaatcacagggaggtggaccggaatatggtaacaatcaaagacgtggcaaaaagatgcggctattccgtctgcacggtttcccgcgccctttccggcaaaggatacttaaaagaagagacaaaacagaaaatactggaaacagttgcggaactgggataccggcccaacaccctggctgtcaacctgaagaccggacgccgccaggctctggctctggtcctgccttccctgactaatatctactacaccaagcttgaacagtacctggaagcctgtgcagcagaaaagggctatatcatttacctgaacaacacggaatacagcctggaaaaagaaaaacagattttagaaaatttaatcggcatggatatagccggggtcatcattaccccggtcaccagccagcatgatcatatcatgaacctggcaaagtacgacatcccttatgtgtatttaaaccgctccttcgaggatgatatggagcactgcctccgtctggacaacaaaaaagccgcctacgaggcggtttcctacatgattaagctggggcataaaaatatcggcggcatcttccagagctttgacaacctcacctaccgggaccgctatgacggcatggcccaggcccttaaggagcacgggctggactgccgccccagccacatgctctttgacatcaacccggaggatatggggaccactcccggccggatcctgcagctgcttcaaaagcccgaccgccctgaggcgatctttgcctgcaacgacatgaccgccttcaatatctaccgggcctgttacatccttgggctgcggattccggaccatttgtccgtatttggctacgatgactgtatcatggctaattttgtgactccgcccctgtcaacggtcagcatccctgtccgcaaactggcaggaaccgccattgactttatccacggttatctggaatccggggtccgggcagagcttcccatattaaaagcctccctgattatccgcaattccgtacgcaacgtgaatctggattagagcttgtccatatcctttcccggatacaccatcaccatctggacgctgccttcaggccgtatttggtacgcttttaccccggctgcaatcaggaagctgtctcctgccttaaggcggatcacctgtccactctcttccatggtgcagcttccggcacacaccacgcccagattgaatttccggttatgccccaccagtgccggcccgttcacctccagtttttccacaaagaagcaggaggtcagcgtcccgtccaccagccgcacccgccggaaggcgtctgttgcctccaatacacggggttctatcctgcatttttccatgatttcttctttggaatactctgtataatcaaaaatatccaggcaaaagtccagcccccgtcccataaaccggccgtcctccggcacaacgattccctcccgctcgaactcacaccgcaccaccaaatcagacggctccataatttccagcatagtgattccctcgccaatggcatgaggcattccgcccggaatataccagacctcccccacctgcaccgggatcttctcaaagcagccgtccatccgggccttgtcctgtttctccacaatttccctccacccatctcttccgggcgtatgctggaatcccagacgtatgtatgggcttataccgtccctcacatggagaatatagtagcattcaagctttccataaggcattcccatcacttcattggcaaactgggtggaagggtgggcctgtacatgaagccgcatggctgaatccagaatcttaagcaggaagctgaggcgccagcccccctccctgccggcggcgcccaggtaaaactcccggtcatcgtctattatgtcccgcagaaacctggggccgtccgcggtctccaccacagccatcccttcgtgtgcaatgggttccattcccggattggaggcttccaccatggagcccacccattcctccggcatattgttgtcctcctgccgggcctttccatggagccggtcaattcccgcaccccctgtgtaatttctccgtaccctgttttcgggcagtttcataagtcctgttgccatcgcggccttcctcctgtcattgtgtatgtgtctatcgtatctgccggattttttcaatcaggtccagatattccccgccgtatttccggtataccggctccattgcctgactccaggcctgcggatcctccggctcaaggatagttaccccctccttctccagcgcctcataagccttctgatccgcttcttcaatggccgttctgttatactcctgggtctcctttgccgcctgaaccagcgcgtcctgatattccttcttcagatttttccaggttattttgctcaccagaatcactccgggggtataggtatgcctgtccttcacataataaggggcaaccttataaaacttattataataatagctcaccggcgggttctccgccccgtcaatggtccctgactccagagccgtatagagctccgcataggcaatgggcactgcctccgcccccagagcttccacggtatcgcccatcatggacgccacctggacccggattttaagccccttcatatcctccagtctgcacaccggcctgtcggtggtaaagaagttcctggctccttcatccagataggccaggccaatcattccggtgcaatcctggatattatccagtatttccctgcccaaatcactgctgcaaaccttccagaagtgctccctgtcccggaaaacatagggcagcaccagggcagacatcatgggattcccgctgtccaccagggacatgctgttgccccggtacaaatcaagcgcccccatctccatggactggtaacagcgcgcatcgtcccccagctgtccggaaggatagatctccaccatgaccttgccgccggtgagttcactgacccggtcggcaaaatactgggccgaatccgtgagcacatggccttccggattcacctcgccgtaacagagcacaatctccggttcattgtccgctcccgcggcccccttattttctaaaataccgtagccgcccgccaggcctgcaatcagcgctgcggccgcagcccctatcaaccactgttttttcaacacgttcctcctgtcccggaccggtcattttccgaatttgcacaaacattaccgcctgaacatcattccctctgaatcttcatttccgaaaaaaactctacatgatactttaaattatccccgttaaaattaagctggcccagcttttcaaaacgcctggctgcctctgaggtcttgacccgtatacctggtatctggttgattccccggataattgtcatcaggctgcggccaaaattcagttttaccgaaacatcctgataccctaaaagggtctccagctcctcaatcatctccgtaagaagctcgcagctcaggtcctggtcctccagggacagggatttgatgatctgttcctccaggccgcagatccgtttcatgccctccgtcatgctgtcaaaggcaaggcgagcctcctgcgcggaatactccctgataaaggaagccgcctccccataggcttccgtcagccgttccatgccttcataagcgccgctgacaccgcaggccaccgggattttcctctcctctgccaggtaatcccttgcgcgggtaatgcagccggtcagctccgtaaacccatcctgctgctgagaatagaggcagatcaccatctggtccatccagatgctgttaagcaccgtcacccctgccatgtgaaaataatttttcagcacctcctgggaaaatcctcccatgctaatcagggccggactggaaataagcactaccttaaaccaccccggtcccactccccacatggcaaactctttttccagtttatccctgtccctgcggccaaagaacacatcccacagcaaatccttttccagatcccggtaaaaatcaaaggctgactttccatcctccaccaggtaattggaataggacagcatggacaaggtatcctcccgttcccttaccctggcaatgaccttatccagtgtctcccgaagctccgagtccaaatagggtttcagcagataatccgtcacccccagcttgattgcctgtttggcaaaggagaaatcactgtaagcggatatcagcacaatctggatatccggatgccttttgcgcacctcctctgctgtcttaagcccgttcatccggggcatcttgatgtctaaaagcacaatctggggcttgcattcctccagcttctccatcaaatccataccgtccactgccttgtagacaatctccagcaagccgggataactctcctttataaccttctccagataattccgctcgtactgctcgtcatctgccaatattacacgcaacataaccctttcctcctaatgcctgtctgatttataaagcttcagcgtaatcttcgtaattccctccgtccgctggatatgcagcacatcctccttccggtaaaacagccttaaccgttcctccacatttttcaggccgatggaagttttggggatgggcgtatccctgcgggccggctggctcggatcctccggaaaacccacaccgttgtccgccaccacagcctcaatataatccggcttctcggtaatcagtatatccaccttccccccgttcacccggtccttcagcccgtgctggatactgttctccaccagaggctggattgtcagcggaggaatcatcacatcctcgtccataaatgacttgcgtacatccagacagaaggtcacccttccctttaaatgcagcttctgtatatacagatatgactgaagcagctcaatctcagcatccagcggaatggataccgtgttgatttcaatgctgctccgcagtattttggagatggccttgaccagctgaatggaggtatcccgctctcccagctggatactgcggattaccaggctcagggtgttaaacaggaaatggggattcatctgcatctgcagctcccggatcttcgcctcagccagccgttccttcatctggtgtgtctcatgcaattccgtgatcatggttctgatttgccgcttcatctggtcaaatgtggcggatacctggttcagctccgcataaggcgtctcctcgatatccgctgcctccaggttattgttcataatttccctggcagcgtctgtcagccgtttaatggaattcaggatactggtgctcatctgatggttcagcaccatgccaaagagactggctgccatgaaaaacacgatcaggatgctgtttgtaagtcccagggttctgctgtggctggcaaaggcagtgttcaggtactccaggtactggctcatcaactggttcaggcaccgctcaatctccaaatccacctcgtccaaatcagccatcaggctgggatagtagtccccgtcaggccgaatgtaggactctgccatctcccgcctgtgctcagccacctgccccacaatccggtacatcatcttgcacttccggtcatttcgcatcttctcatccagtccccgcagctggctgtcaaacagctcgcactcgtcgtagtactgcttaagcatcccctcgtcgtggctcttgctgtacagcttaaagtaggtctgtctcctgttattgatagccagcagcccgtttacctgctggtaatcctgtaaaagcccgttgtagcggcgggaggatcccacattcacaagggcgttggatgctatgaagataaaggccaccagcagcagaatcacatggttccttgtcatttcttttcgtatggatttcatgaatcgtttctcacttttctgcgggggatttttcccggatgatttttcttctgaggttattctacaacggcaggggaagaaaaacaagtcagactgagtctgacttgctggggcctgtgtgggggcaggtataaacctgccttatgctattttgtctgcccctatctccatcacatacggctggatccagtaaaacgcagctccctggaatttcagtgttacttccgtatcgccttcctcataaaaaatccggaaaccgctcagaacgcccttctcatcaaaatcataccgttcacgttcccatcttccccatcttaactttctctggcagagcagtccctttaacgccagctccctctcttcatgcactgcctccacgtcgatgtacacagcgggtctctctgtcactttggcatttccctgtccgtcctctgattctattgtctggggcttcatcctggtaataccaagaatacgcacagaaccgtctttccacggaatggtttcctctaattctttatagtcctccgggacaggcagggtgactggctcagattcctcactgttcaaaaacgtgattcccggaatatgaatccggaaagacccattctgttcctcctggggaacatcgaacaggcatctgaggcgccgtccgtattgctttatatccgacagccggtaatgtcccatattgtcccaataaggattggcagacaactcctttatttcatactgtctgccgctgccggatatggttggcatatccaggggcggtgtgtccgtatccagggacggcgttttgtaaccaataattatggacggccttccctcatcactgtacacataccaggatatcaggattccctcctttaccttttcccccatacttataatggatataccgtcatgggtatctatgcttccattctcctcttttgccagttcctccagcgtcccatattcaggcacacttttcagggaaaattccaccggcttttcaaaatcaaaaagccggatcgcatagcctgacaaaagctcttcggagacaggagctgatgggagctcaaatcttgcctctatgatataacggatgttcccatattcctcaaaataagccgaatagtcagcatataccgattccacaggcttaattccgccttccggaatgccgggacctgtgaggaacaggccttcgcctgatttccaaagttcgtcctgatatttctccgaaacaatcatggtcccgtcacttagcgtaaaataccggctgtctgcgggaggttctccgcctgccgggattttctgtacttccccatagtcatccaaaaccatactcacaagcagctcctgcttctggtggagggcagatgtcagggatatggtcttttccttttggggcagcttgggttcaactacagcatccaattcgtataccggatattccgattgaatgattccatattttgaggcaaactgatacggcaggccagagacctgcccctgggatttgggcacctggttcactcccggttcctgctgcccttgcgtttcctgcttcccttgcgcgtcctcctccgtttcctgattcacctttgattccggcaccggttcctgggccgtaccggccgctggcttggaaacattctctttcgttccagagcccgctgcctctccctccgttcctcctcccaaccggcagccggacagcaaaacagccagcagacctgctgtcataagaatagatattgtgcttctcttcatggcgagtcctcctctctccaataaaatccacatatatttatctgtttttatcataacagggctgctgcctgtatttatttcttatttcttacatcttacgaatattaagattaactttagcagctggaagctctcatggttcatgataaacatttcatttccagcaatttttgtatatcacagaaatgagcttcaccggcaacgcggtagtggatccatccgccgtcaccacaagggtatttgttgtcgatacattcctgagtttctttctcaacctggtcatataccaaatgaaattgtgcgtttgacaaccgaatcataacggtaaaggcgccattctccgcaaacacattgcaaatcagctttttcttctttctatgggcaactgcccagccatatttattcccatagggaaaagtaatctcctgcacagtgctgcatgtatctgacaaccactcattgattcggataaacaactccatacctttgccgcagtacgcggccatatcatcaaatgccggtttattctgcttgtcaagcattctttcatacatggtaaacctccctctatccccttttctggagccatgattatcagcccgattcttttgctccaaaggcgataagcatatgtttctttgattgtaatatcagggtgcgcttctgtcaaatgcaacagcctttttttcaattggccggcaaaaacgtaagcaccagccgttagcccggggtatctattccaaaaccaggctctccaaaaagcaaaaagaatctcccaaaagccgcagcttttaggagattcgctttataatacaatacacgcagcatcctttctatactgatattactgcacccacgccccgctctcatccacccgcgagccatccggcgtggttgtgttggtcagcatggcgccgtccgcgcccagatagaaccactggccgttttcttccaccttttcccactggttcctggccatggctccgttggagcgcaggaaataccatttgccgtttacctggcgccatcccttggccatatatgtattggaatcaatccagtaggaaacaccgtctgccgtaacccactcattggcagccttggccccgttatccttcacatagtaccatccattgctgtcctgtacccagcccttggctgaggatgttcccggaccggcatttcccatgccggaagaactgcctgtcgtgcctgcgttatctgaactgcctgtactgccagcgctgccgcttaaagcacctgccttcaccagttcatatccgtaatcgaacaatgccttcgtatccgtataatgagtcgatttgcttttcatgataacggcaatcaatctgactccgtccttctccactgctgtcaccagggtatttcccgctttggacgtataaccggtctttcctccgataacgcccggataatacctggcatcgttggggttcagcatcttgtgtccaatggtcacggtaagcccggaaggattctttatggtagcaggcagcgtatacgtgcgcgtggacgccaccgtcttcaccacatcattctgaaacgccgcccttgcaatcagagccatatcatggggtgtggtgtaatgattggagtcattgaggccgtgaggatttgtaaaatgtgtattggtacaccccagggccgctgccttggcgttcatcatctccgcaaatttggcattgctgccagccacatgttccgcaagggcatttcccacttcattggctgatttgagaagcagggcataaagacactggcgcacagtcatcacatcccctgccgtcatattgatggatacagcgcccgcttccaggttcgtggtagctgttgctgaaaatgtgaccttgtcatccagactgcagttctccgccaccagcagggctgtcatcagcttggtgatacttgccggatagaactgtttgtccccgttcttggaaaacaggacggttcccgtggcagcatccatgagcacggctccctccgaagctatctccggcttctgcacggaagctgcggccgtctggtcaaaggtcccggcagcctggccggctgacggattctgcgacggacttcccgataaagaggggctttctgacggggagggggttcctgacgtggaaggactccctgaggtggacgggcttcctgacggggacgggctccctgaggtggacgggcttcctgacgaggacgggcttcctgacggggacggacttcctgatgaggatggcccgtcagatgaaatgaccgctccgtcacttccggattccgaacccggtccctgggacgataccatcccctggtcagaggtctggttcccggactggaaggaagatacctggctttcttccaaaggcgtgatggcagccggattagctgaagctgccgtactcatcaacagggtacagctggtgcatatacataaaaatgatttccatttcttaagtctcataatatctctcccatacagcaggtcattctgaacaaaactagagatattataccatacttcatggttacaaaaaacatctatttctgacgataaacttacgatatatatattttttctttaattgcacaggcagattttttctttccatccccccgcattccattatacagtggttccccatgccttcattccattgttttactatgccttatcctgccttcctgccggaatgtgtttcatatccgttccggaacatggtgcaggaacaccttaattcacggatgtcagatctctataaaattctatgtatccgcattccgtgcatacataagcgattgttggccccagctggtttttagaatcgggaatacggtccagttcatccacccatacaaggtgtgttctgattcggtttatctccatctggcctgaacattttggacaccgcatatgcacttacctcctttgtcgtttttttcattatacgatggtttaggtgaaaataaaagccccctgggctgtatgcccgatgtccatccacactccctgtatccagttatctgctatttctcctggctccggcacaaatacccctcaatcatctccagctcatccagatatatacaatttggaatcccgttgtttctcaccgcctccacacactggccaagccccatccacatgacgctctccacctcttctttctgaagggtaagacggtctgcatccactggtttgctgtacacatacacagcactgacttcactgtccctgaacatcctcccgtaaaacacttcttccatatatcccttgtgatacccggcaaattccaggtcctcctccccggcctcaattcccagctcctccttcagttcacggatggcggacggcaggaattcatcaccggcctgcacatggcctgccgaggaaatgtcataacagccaggataggaatcctttcccctgctccgcttctgcagcagaagatcgtatgttttatccttatttttcctcacaacccatatatgggcagtcctgtggggaaccccgtccatgtggaccaggctccgctcccggaccactccagtcttctttccgtccgcatccagtacatcgaacaattccaactgttttccgttcagaacagcctcactcagccggtctccctggtaagccagtttcagtgaaaagaagggggcatcctcatttaacagcttaaaaaagattttatccccttcccacagattcagggacagcacgtcctccttctttacccactccagcgtaccctcgttgcagggaatcatttccccctcatatttgtccgcagtatacagacacatgtactctgtatcccagccctccgcgatgaatgtgaccagccccctgaaccgccaggatgtgagagtaagtcctgtttcctctctcacttccctgagcaggcagtcctccgggctctcgtccccttcaaaatgcccgcccactccaatccacttatccttattcacgtcattctttttgctgattctgtggagcatcagatatgccccctcattttctatatagcacagcgttgtcagcctgcttttttgttccatatgcctgtcctcccgttaaaacccgcccatggcgggcgatctgaaatacccgtcggagcagctccgacgggtatcattataaaccaattcttcttatgcttcaatcattatgcccgcatccctattcttcaattgaatagttgggagcctccttggtaatatggatatcatgaggatggctctcctttaaggacgcagcggaaatctttacaaactgggctgtctcctgaagagttgtgatgtcctgggcgccgcagtatcccataccggagcgcaggccgcctaagagctggaacacagtatcctccaccattcccttataagccacgcgaccttccacgccttcgggcaccagcttctttgcatctgtctggaaatagcggtccttgcttccgttttccatggcagcaatggatcccatgccgcggtataccttatacttacgtccctggtacagctcaaaggtgcccgggctttcgtcacatcccgcgaagatgcttcccatcatacacacgctgccgcctgccgcaatggcctttgtcacatcgccggaatacttgattcctccgtccgcgataatgggtacgccgtactccttggcaacgctgtagcagttcatcaccgccgtaacctggggcacgccaatgcctgccaccacgcgggtggtacagatggaaccaggtcctatgcctaccttgacggaatcggccccagcctcaatcagcgctctggtggcctctgccgtggcaacatttccagccaccacctgaaggtccggatatgcttccttaatcatcttcacgcagcggattacattggctgaatggccatgggcggagtccagaaccaccacgtccacctttgcgtccaccaatgctcctacacgttccagcacattggcagtgatgccaacggcagcgccgcacagcagacgtccctgtgcgtcctttgcggacaacggatacttaatctgcttctcaatgtccttgatggtgataagacctttcaaattgaaatcatcgtccacaatcggcagcttctccactcttgcctttgctaaaatggcctttgcttcctttaaggttacgccctccctggctgtaaccaggttctttgtggtcatgcactccttgatgggacggtcaaaatcctcctcaaactttaaatcacggttggtaataatgcccaccagcttcctgccctctgtgatgggaacgccggatatgcggaattttgccatcagatcgttggcatccttaagagtgtgctccggtgaaaggaaaaatgggtctgtgataacaccgttttcagaacgcttaacccggtccacttcctcggcctgggcttcaatggacatattcttatgaatgataccgatacctccctgcctggccatggcgatggccatgcggtgctctgttaccgtatccatgccggcgctcataagcgggatgttcagtttaatcttctttgtcaaatgtgtggtcaggtctacctggttgggaatcacttctgaaaatgccggtaccagaagtacatcatcaaaggttatgccttcgccgataattgtacccattataaatttcctctctttctgcgtgtatgatttgatatgttttgtcagaatattgatagtccgtgaactgtccgtttcttattagtatcttatactagcaaattttatctggcttgtcaaaccaaaacagagagaaatattcattgattttactaatagggttccatcagccattctaatatccccctgcggctgtctgccagcaggttagtactgccagctccatatcagacaaccttatccgggttcaggatcagattgggatcaaaggcctttttaatccgcctcatcaggccaatctgcgtgtcccccagctgttctttcagatattccttcttggcataccctatgccgtgttcccctgatactgcccctccatattcccgcgcccttgcgtacatcatctcaaagcccagactcagtttttctttccactcatcctctgccaggtcatcccggcaaagatacacatgaaggtttccgtcgcctgcgtggccaaagctgggaatccgcagattcagtatcccggccacctcatgggtgtatttgataaaatccgccacccggtccctgggcaccaccacatcacactcatccatctgggtagtggacgccttgattgcttctaaaaatgcccctctggcgttccacacgctctgtttcctctcctgtgtatccacgatgaacacgtccacagccccgtgttccaggcacaggtccgccacctcccggtactccgcccgcacctgctctgcatttcttccgtcaaatgtgagcaggatataggcgtcattcctggtatccgggaaccgtttgcccagatattcctccgcaaacaggatggtctcccgctccataaactcaatggccgtggcctgtatctgcgcttccacaatcaccggcaccatctctatggcctgctccatatctgcaaatggaaccagaaggctcactgtcttcccaggaaggggaaccaatttaagcacggcccgggtgatgaccccaagtgttccctcagatccaatcatcagatttaacagactgtatccggaactgttcttaaccgtcttaccgccaaattccaccacctcgcctgtgggcagcaccactgtcagcgccctcacgtaatcccttgtgacgccatattttacggcccgcattccgcctgcattggtgctgatatttccgcctatggtcgctgatttctcacctggatccggaggataaaaaagcccgttttcctccacgtactgcgccagatccattaaaagcacccccggttccactgtcacagtaaggttcctgcggtccagctccagaatatggttcatctgtgtggtctccagcataatgcctccgtggatagcgacagccgcccccaccagccctgtgccggagcctctggtaaccacgggaattccctcccgattggcataggccatgatgtccgaaacctctccggtggacaatacccttacaagggcttcgggagcgcgctccactccccccagctcatcgtggctgtaatcctggcttatatcggatccggtcaggacccgtccgtcctctgtcacctttttcaaataagcgatatccctctcatccagtttcctgtaccccatcacgtaccctccttaaccgtcttaagcagccgtggaagtatctcataccagtcccccaccagaccgatgttggcaatgtcaaaaaccggagccttcctgtccgtgttaatggcaatgatgcactcagcacccctcatgcccgccgcaaactgtacggaaccggagatacctatggtaatgatgagctttggcttcaccgttctgccgctgagtccaatctggcgcctggcgtcaaaccagccgcactcaatcaaaggcctggtgcacgccagctgtgcgtccagcgcagcggccagttcccttattaactccaaatccgcctggctttttacaccccttccaacagccacaatcacctctgcctccgatatgtcaatctcctttggcttatgtatgatttcctctaccctgattctccggtcaatcatgccgtccgtcacctccatggtacggatggtgcctgagggatcctttgtcaccggaggcgcggaaaatatcttataccggaccgtgcagaactgcggccggttcttcggcgtcacaatctgagccataatatttcccccaaaggcaggacggatctgcaccagatccgtattctccttcatttccaggaccgtacagtctgctgtcagccctgtcctaaaccgcgccgctaccctgggagccagggagcgccctgcgttggtggcccccaccaggatggacgacggcctgattctggttatgaaatccgcaaatacattggcgtatgtgaggacggagaaatgttccagctccttcctgtcatacacaaagacctggtccacaccgtatgccagcagttcctctgccttttctcccacccgataccccataaacagcgcatacacaggatggcctgtgacggctgccagttccctggccttgccgatcagctcaaatgtcacgggatgtacggcctttccattgtattccacgtacacagccactgcgcgccattcatccttattaatccccggttcctgtgtttccatatattccacggccccgccaggacctttcttcacacacagcctgcacattctgcagccagagtcaatttccacctttccatccctgcagctgatggcaccaaagggacatatgtcaatgagctggcggatgccgtcttcatccagctgttcctggtgaatcctcagttcagccataatcctctctcctttctgtccatacaactatataaactttgtttctctcagcacatgatacatcttatcagcaagcacatcagggcttccatcgaacatttccctgcattcactcttctccggcgggaatatacgctccacctgggtgggcgatccggacaaaccatagtggctctcatcctggtcctccaggtccgtaagggaaaactccctcagatatccctcccgcagttccttttcccgtttataggaagggagcctcggcgtattcacatccttgtccatggtaatcaggcatggcaaatccatggcctgtatctgttcatatccgtccatattcatacgcacccgtatccgtccctcccctgtctccctgatttccagaacattggaggcatggggtattcccaaccactgggccacctccggccctacctgtgccgtgtccccgtccgtggtctgtttgccgcagagaatgagatcatactcccccatcctgcgtatgccctgggataaggtatagctggtagccaccacgtctgcgcctgcaaatttcctgtcgctgatcagtcccgcacggtcggcccccatgcacatacactcttttaacgcctccctggcctgtcccggccccatggtgatgacatccacggtaccccccagctgctctttcatcccaagggcggactccatggcatagagatcatacggattcagcttggactgggtcccgtcccgcttcagcactccggttaccgggtccacctccacattggcggtatccggcacctgcttcacgcacacaatacatttcataaatccctctccttaaaaaatcggtgcatgtatcacctgtttccaatacatgcaccgatatcataaatgaccgtacctattacattttcgtcaattactccatgtctgcaagtaatttctcgatctttttcttattggcgtcatccagctcgcccaacggcttgcggggcagacctacatccaggccctgtgcctgtaaggtgtacttacagatttcctgccagtggggaaccccgttgaccttatcatagaagaaataatcaatatatggctggatattgttctgggctgcaatggctgcatccacatcttttgcgaagcaggcatcctgaagtctgcggcactgctttggaagtacggccgggaaacctgacagccagccgtccgctccggccaggaggccttccatggcagcatagtcatgtccgtagaatacagtcaggtcatccttgcagtggtacttcagttcgtggaccctgttggggtcgccgtgggctgccttgatgcactgtatggtaccgtcatccaccagctccttgacctcctgtacgctaagctcatagccggcaaaccagggattgttgtaaaccatgatttcgatatccagcgcttcccttaaatccctgaaatgctgcataactgccttcttatgaggattcaggtagaatggaaggatcaccatgacacagtcagcaccgtggtcctgtgcgaacttgctcatcttgatggtattcagggtatcgtatctgcctgtaccgcataccagaggaacctgaccgcctaagaaaccagatacatgttcaatgatttccctctgctcttccatgttcatggcaatgttctcgccagtgcttccgcagatggaaatagactgtgcgccattatccagcagccaggtcaggtacttctccatacccttcttgttgtaagtctggtctgcattccagatggtcatggatgccgggcagataccgtaaggtttcttgattgtgtctttcactttcatagctttctccctttcccccaagttacacttggaataaaaaattttgttggtgtgaatatgtgattttaaattaaaaataaaaaattaaatattttaaattattattttgcctgatttaaaactaacacatctttcgtgtaatgtcaacaaaaaaattaaatattttttattttcctgttcaccttccacaacggcaggataaaggcagaaacgccctttatccgcccagataggattttttgatggtatcacttttagccagctcctcactggaggcagtaattaccatacgcccattttccagcacgtaacagcggctggatacttccagggccatgaaggcgttctgctccacaatcaggatcggcagatgcttttccttgttgattctcaaaaatatatcaaacatatcgtccacaatcacgggagccaggcccagggatggttcatcgcacatcaggagcttgggatctcccatcagccctctggctatagctaacatctgctgctcaccgccgcttaaggatcccgctttctggcccattctctccttcaggcgcggaaacaagtcatacatctcctcaattttggcattcatttccttcttggaccgctttatgctgtagctccccatctcaagattctccaggactgtcatgttggagaatatttcccttccctccggaatctgcaccactccggtcctggttatgctgtgtgtgggcagattggttatatcctgtccgttaaactccacattgcccttttttaccttcacccagcccacgatacagttcataagcgtggtctttccagcgccgtttgaaccgatgatggatataatttcgtcatcgcctatttcaagggaaatatcatgcaatgcacagacatcgccgtaataagcgtcaatcccattgacttttaacataagaatccctccgattatctggaatcctgctccacataccggcttcccaggtatgcgcggataacctcttcattgctctgtacttcctttggcgtgccttctgctatcatgcgcccgaaactcagcacagttatgtagtcgctgattttcatgaccacatccatgttgtgctcaatcatgaaaaacgagtatccgtcctcataggccttatagataacatccaccagctcggcccgctccgacgggttaaggccggccgcaggctcatccagaagaatcagtttgggatcattcatcatggcccgtccaatctccgatatcttctggcgtccatagggcaggttcttcatcagagagccccgcagctcatacatgccgatgcgtttaaggacctcttcagccttctccttaagcctcttttcctctgcccgtgatcctctgatgtcaaaaatcccccgcatcattcccatgggggcctgctggtgaccccccaccatcacattctcaagcagagtcatggttggaaatacttttatgttctgaaaggtccttccgattccctgcctggcaatatcatgggtggtcatgccggtaatgtcctttcccccaaattccaccttgcctgacgtcagaggcagcactcctgtaatcaggtttacggtggtggtcttgcctgctccgtttggtccgatgagggcgtgtatggtgtgctccttcatgtcgatgctgacattgtcaaccgccacaaggccctggaatttttttgtgattcccgtcactttcaacagactttccattctcttattcaccgccttctgcatagctctttccgctgattctctgatacatcttcatgaacaggcctgttgccgcactcacccagccgtccgggaagaatatggcccccagcaggatgatagaacagaacacgatttgatagtaattgcccaggaaacgcagcatttccggaaggatggtgacaatggctgatccaaatatagttcccaccacggaccccagtcctcccaccatcagcataaccacatagttggtggacaaatccaggttaaaggtggatgggtttatatagcccatatagtgggcatacatggctcctgccacggtaccgaatatagatgccacggtaaatgccttgatcttgcaggaagcgatgtccacaccgctcatctccactgcctccacgttatcccgcagggatttgaaaatcctcccccacttggaataggcaatgcgccaggcaataaaaaaagcaatggcggtaaataccagaaacaggtaatacatttccttctggctctgtatctggtagcttccgatattatagggccgtatattgcggatgccctgggtgcctcccgtgaatttcggcgtattggaaatcagcaggcgcaccacctccccgaatccaatggtggtcagggacagatatacccccctgactctcaggctgggatatcccagtcccctgccgataaggattcccatgataactgccgcaatcagccccagccagggcgtcagattcgtgtatctggtaaacagggcagaggaataagcgcccagcgcaaagattcccgctgtgcccagattcatctggccggtcagaccagtgatgaaattcaggcctaataccacgataatattgatgagcacgcggttaaggaccatcatgtagtaatcatttttaatgaatatcggcagaaaagcgccaatcacaagggctcccacggcgaaatgcagtgatttaagtttcagctttttcttcatcttcccttactcctttcacgccttcttgcctaagaatccgctgggatgtaccagcaggaatatgattaacaggacaaatgacacaatatctttatagacagccggaagaaccaccaccgccaggttttccaccactccgatgaacagaccgcccaggatggctccaggcaggtatccgaatcctccgatgactccggctgaaaaacctttgaggcctatgctggctgccatggtggtggaaatattgaacagcggtatgatcagcattccgatgacgctgcatataatggagctgactgccgttgtcacgcagatgttctgggccacattgatgcccataagggccgcggccttcttattctgggccacacagcgcatggcctttcctatttttgtaaaattcataaacaactgaagggccgccactaccaggattgccaccacacatatgatgacattggcctttgtgaccatgagtgtaccgatcttaatggtaccgctgagccagttctcaatggtgaagggaaccggtccgtatataagccggatggcctctgccagaatcctgcctaacatcatggttcccatgacagcaaagatattggaacgcatatgccgcagcggattgaagattccggaagcgattacagaccccagaattcccatgagcatgaaagtaagcacaatggctaagggcttgttcatattgaatttaatgatgaaggtagctgcaaatatatacgcccccacggtgatgattttgtcatggctgaagttaagcagtcctgtggaattccatatcagggtatactcgatggcaaccagggcatagatgaatcccatggcaataccgcttatcaatagctgaagtatagtgcccatcatttacctccttttcgtcatgacaggggccggattcagattcaggccgggtccgtcccctgtcctccataagccagaaactattccacagaaacagctttaataaactttggaatcttgttttcaatccgggccacattgatattgtggactaaatcattattctcgtcacaggtaatgactcctacgggtacctttaagtctttcagtcccttgacagcttccataacagccttgcggtccgtggttcctgctgctttgattccttctaaaagggccactgcgccgccgtaataggatgctgcgtataattccggttcgatctcatactttttctcaaagttctctttaaatgcaacaagggtggggtcgtcgctggtggatacataatccgtcactccataccagccttctatgtattccgccttacacatatcaattacctgctgcatggtaacgcccggagaagacactacctgcacatccagtcccagctcgtatatctggcgggcatggattgccagctccgcgtcgtgggtccatatgatgaccgtatccacgcccgcgtccttcatcttcataacctgaggagtaaagtccttgtctcccgtgttatgtccttcttccacatactccatgccgttgtccgcacagtattgcttgataacgccctctgctcctgttccaaaatcgtcattgttaaagaacagtcccagtttcttgcagccaagctcttttgcgtaggctgccgccgcctctgcgaaaatactgtcagaagccctgcagcggaacagataatcattgtccagagtactgatctgcggtgtggtgccgcctgtgaaggcagctacgcccgcctgctttaccactgcctccactgccagggcattggtgcttctgtggggtcccacgatacccaccacgccttcgccgatcagcttattggcacaggtaacagccatgtcctggagggtctggtcgtccacaatagtcagttctatctgctttccattgataccgcctgctgcgttgtactcgtccacagccatctgtaccccctggttcatacgctccccgttcagcggattgtctcctgtcatcatagaaataaggccaatcttgatgacatcgccctcatccgcggaaacctcaccgccggaggatgcctgggtatcccctgcctgggaacctgcgctgccggaagatgccccctgctgtcctccgcatgctgccagtgacaatgccaggcttacactcaacgtaactgctgcccattttttcaacataataccttctcctttacttttgaatttttatgtttttagttacatgatatacttaaaaccatcccggatttgttccagaagttccatgtcatcaggaatcgtaacacggtgaacatacgtaatcagctcctccagcccatcttggggcaccccggcctcccttatgctgacaggtatgcccacctccctgagaaaagccttcagttcttctatttccgcctccggacgtccgttgacagccagctgaagaggcagggccatggcaacgatttccccgtgaagatattttcttctcacgtccttgtacatacagcagactgcatcataaaaattatgtgcaacggccagctgcttgcctcctgtggacaggtctgacaccatgccggtcagcatgatattcatgttcaccatatcatctatgagcatgctgtccttcccgtcatcgaaatccttaagggcctgtctggtgtccctcatgtacttactgtaggtaaaatccgcaatctttgtggctatctccgaggtggcaatcataccttcatccttcagatgggccatggtaaagctgaattccggtttttttgccatggcatccacgatgcccgacacaaaatagcgccttggacagtcattgacaaccaaatccatgtccacaatgaccccgctgatttcatgattcaggaaaccgctgtggtctacattgccgtcctcgccgtataccacatacagaacagcgtaggccgcgcatgtggctgcggatgtgggtatggtaaagatactggcatctgccatatccccggctgccttggcaatgtctatgatacggccgcccccgattcctgccacgatttcagctcccgattccctgaccctggcagctacctctccaaagttcttttccgtggaaggtccctcaaatatctccgactgaaatgtaatcccggatttcctgagactttcctccagggcctggctggactttcccttcaccacatcgtccccgtacagcaggtaagccttctttccgaaaaataccatctcctctcccgcacgcttcagtgcgccatggcactggatataacgtccggcccctacctgaatatgtttaccttcaaacatctctgtcctctcctttaacgcaatttttaatttgttatggcaaaataataaattaaaaattaaaattttttatttgagagtacacgttaccaaactaagtgccggacaacccatgaactcctgacctgaattcatggaaacatggattgcctgattcttagcttaatgccaaacttcttatatattagattactgcatatagattactgttttttaagctgcttcgtcctggagcgctgcgtgtcttggtctgctgcgtctttgactgctgcttcttggtctgccgcgtcttggtctgctacttcttggtctgccgcgtctttgatgactgcatttactgcttccgcatctgttacttctgattggtgatgatgtagaatatgttgtttatatggccggcaatcatcttttcagactgctccatatccttattccttaagtactccagaagtttataatggtcatccactgtggaacggaaattcctgtttctcaacggcagcacaaggtaattggccaccaggaactggccctgtatcctcttatacagctctgacagatattcattcctggccccggataccagcacacggtgaaacctcaggtctgtcttggacagctccaggaaatcccccttatccagatactcctcacactttttagcacatatctctagctggtcaagcaatgaggacacatctgctgccgctgaaagataatgctctatggcatgcttttcaatcataagccttacatcacagatattcttaatctggttctggtcaaaggtgggaaccaccacacgcccgttgctgagcttttccagtactccgtcattgactaaaagcttcaccgcctgaaccaccggtgttctgctgacttcatacttttcgcataaaacgtcaagtgagatagcgtcatccatcttatattcaccgaggataaaactatcaataatctgatcgtagataatcttatctaaattcttttttaccctcatctcaacaactcctttgctcgtactatcattataaaggatagaatgaaataatgcaatattaaatttttaatttttaatttatttttgttgctaatatacattctccccctgtttatctcgttcatctttagtcaaattgcggattgttatcttcatcccccattgatatactggttataatctataaaccagcgctgtattgtatccataacagtgattagagtgcctgataccaccataattcacacaatgcagtgcacaccaacagaagcggaggggttttgtatgaaactggaaaacatctcagatgtaaaagctttttttgaagcagtggaccagtgtaaaggaaaaatcgaactggtatccccggagggcgacaggattaacctaaagtcaaagctatcccagtatctttccattgccaatatgtgttccaacggatatattagagaattggaattagtggttcatgaaaaagaggacatggaccggctgatagaattcatgttaagcggtgaaaacctgaaatagagcaaaataaaaagacaggccgccgggacagctgttattcggctgtccccggcggcctgttctctaccgacctgccctatatgcccattgccctacatcacaagctttcgcggaaaggttctgcgcatggctcctatcattctctcatttggttcaatcagtaccttaaaatggtccggacccttctggtatataagggcgtacaccttggcatccttcctgccggacgaaaaatcctttatcttcatgccctgcttctcataatccttaagcacaaaggaatctgccggcgccacaatctggatgtcatccttctcacagtcaaatatcttctttctctttgcctttcccaggatacggtccaccgacagaccgccctctgcaaacagatattcaaactccacactcaggttcaggaacacaaaataggtagccacacctgctatggtcataacaattactccaaatacagtctgcagcgctgaaaggacggaaaatatacagaccacaatcatgagtatttttacaggaacggcatatgccggatcttttctcttcacaagccactctacatagttatcatcgttcataatgtctctcctttatcattttgcatattacacattatacaatactttatcccatttttccagtcatatcattcttatgccggaggaaagaaagagcctgctccatattttccacggtcctgtgattgataaaatgttcaatcttttccaccagctccagttcatcctccgtatggttgagggtacagaaaaaatcctggagcacccggtgtctgtgcagcagatacctgccctcctcatatcccttatccgtgaccatgatggagccgtatttcttgaaatcaatatatccggcttttctcagattatccaacatttttgaggcggatgagggccgtacgtgaaggctggcagccagggaactgacacggatgggttccccctcttcctccattctgcacaccatctccagataatcctccatggatgaagtcatctcatcggaagcagagcgttcatatcctttcatggtatagaatccatctttatcagtaaccaaagtgtccctcctgtaatactatatgagtaagaaaaagtttccctatcctaaatctattgcgaggtattgtaattatgaaagaatttctatgtttgaatgatataaaacccggaaaccgggcacgtgtaaaagagcttacttccacaggcagcatacgcaggcgtcttctggatatcggcctggttgaaaatacggaggtggagtgccttgggcaaagccctctgggagacccctgcgcctacctgattcgcggtgctgtcatcgccatacgctcagaggactgccgcgggatactggttcagccctgcactggtttcagcgagcaggaggtaatggagggctgcaccagcctgtgaattatctccccaaaaacagctgtcgtaagaaacatcatctgactcaggtcagatatggaattgcctaataaaaaaagaaaaaggagtattaaaatgggtctgaccaaacaatccgtcggaatgggagctgtggattccggactggagataaaaaaacagacacctgatgataaaataatcgccatagcaggcaaccccaatgtaggtaaaagcacccttttcaacaatctcacgggaatgaaccagcataccggaaactggcctggaaaaaccgtgaccaatgcccagggctactgtaaaacagaggagcacagctacgtgctggtagatatccccggcacctattccctcatggcccactccgcggaggaggaagtggcccgcaactttatctgttttggcggaagcgacggggttgtggttgtgtgcgacgccacctgcctggagcgcaacctgaacctggtacttcagaccatggaaatatcggaccgggtcctggtatgtgtgaacctgatggacgaagccgcccgcaagaatatcaccattgacctgaaggggctgtcggaaaagctgggcgtaccggtggccggcaccattgccaggaaaaagcgaagccttgaccagctgatgaaacagctggatgacctggtggaaggtacacaaaccgcctctccctaccaggtggagtactcccccattattgaacaggccatcgccatggcagagcctgccgtaaaggccagggtggagggaaaggtcagctcacgctggctcaccttaaagcttctggacagcgacccgtcccttatgaaagaattaagggaatatctgaatgaggatatactggaagtgcctgagataagccttgccctgtcacaggccagggagcatctggccaagtacggcattaccaatgaaattctaaaggaccgcatcgtggctgccctggtggcatcggcagaaaaaatatgccgtgatacggtccagttccacaaaaacggctacaatgagggggaccgtaagctggataagattctcaccagccggtttacaggctatcccgtcatgataggaatgctggccgtggtattctggctcaccatcacaggcgccaattacccctcccagatgctggcggacgccctgttccgcctccaggatcagctcaccaaagccttcatggccgcaggcgccccccaatggcttcacgggctgctgatattgggagtctaccgggttctggcctgggttgtctcggtaatgctgccgcccatggccatcttctttcctctgtttaccctgttggaggactcgggttatctgcccaggattgcctataacctggataaaccctttaagagctgccatgcctgcggcaaacaggctttaaccatgtgcatagagtttataaacttgcaaactatttcttccttatttaaatgcagtatttatgatttattcgattctccatataaataatacttaggcgggcccggtaatccggtacccgcttttataatttctaaaatccaaaaaactatatcaattcctcttgactttccacgcattgcgtggtataatctatatataagataaaggacgggggaacagaaaaatgatgaaaagagcagagaatacaaaagaaaagagaagcgaattgcacggatacaatatcatggtggaccgcactgatgtccataagattatcgctttcaaatttactcaagaaatgaccggaactgagaaacaggtagcatacgcaagagatatacttgctcagaaggttttcaagacagacgaaatggctggaatgatgatgtccaagggtaagatggatgcacagagttacacagccggaatggaaagccttatcagccagttgagccaaatgacagatgccaaatacatcatagagcatgttaaataaggaggacgttatgaacagaattaaagaataccgcataaaagcacgtatgacacaatctgatttatctgcttatctagaaataccgaccaggactattgaggactgggaaaccgagaaacggaatccagctccttgggcggaagaattgatcatcagacaattagaggaattaatccatccttgtctcatgaaaaaacttctaaataaattttcggatttggcttacgaaaagctgcttccggaaaattacaatgtattttctgattcccgcaaattttctcatgatgattattttaaaatcatacacgatgaaatggaaaaaataggagttgaggacggcgattatgagtactgtccgaaaagcattgaccccaattacctggagaatgtacgagccgggcgggaaatacatgaaactatattataggaggaatatcaatatgaaaacttttaaaggatacataaattatggatgtttagctactgagaaacgccctttgtttactgcgggaaatcctcacccaacagcaacagtcagcgaggcggtagagtatacagtaccggaaggatgggtctgcgatgaaacggaaactggcattgcattgacagctccgtggggttggacttatacaccgaacgagctgctgcagggtaaagaatccccctatctatgcgtaatcaataatgaaggaaaagaaatccatattatgttggattggaaacatatttaaaagaggataatagcatggaaacatatgatatttttaaatcagagggcgtgttatagaaaaacttgtgcaaggtaggcaaatggtagtcattgcctaccaaatatcgcctgcatcatgttattttccttgttcatactttattcacatttgtgtgatatattctgtgcttggaatcatgtgtctgttttttctttaatcccattgtcaactggcacacgtttctcacaaacgaggctggcaggaaactgtcggcctctcctctttttcagaacatgcgcacccgaacatttggtatctgcctccctcactctccgccttccgcctcccctatcctgatggctaaatccaaaacagtagcggctgtctcgtcactgatgaaatgaatatgattcatcataatatcatttataagcaatctcatttcacaaaacatgtcctctgccgccttggcagactgatattgtacataagctccttcaatcataactttatacctccccaccgtttatatatatataaacgcttttttcggtatttttctccatacattttttacttgtgacaaattcagtaagcatgtggctgtgaacaacagttcaattttcaattaacattgaggtgtttttcgttactaataacaaaagacgccattatggcgccttaaaatttttccagttaacaattaaacctgctacttttttgtcacagaaatcacagttccagtgaatgcttctgtttcttccagttttcctgtataaacaacagaaaccgtatctccttctttgacagaagataatccttctggtttttctccttcaaagctaagaacataatccactccatccccatcggtgataacaaacataaaatccttaatgtcactgatagtacctgtaagagtggattcttcttcagccattctattttcaccgcttttagtggaagacacatcaagcgtactttccgctatcgaagtgctaactatctgtgtaggcgctgcggaagacacttcacctttctgcgcggaacatcccgcaaccaacatcaaagttacacaagtagctacaaatacatttcttttcttcattatcaaatcctcctttttataatttcataatattagacgtattgtatttcaaaaaagttgcagattttaaaaattttttttaagttatctttttatttttcctattcatactttgtctatatttagtcgatataatattttcgtagatgtcaccatctatgcccccgaatattttgtacatggatgggtctggtcctatggactagacccatctcctctgttatccccatccttatctggcatcagtgtcaccactcgaacacgtaccgtcgatttaccatgtcgtattcttctgcaatccggagcgctcccctggcatccgtaatcatgcacttgccctcgtcgctgcccttgactggacagagtaaaaatgcctcaccggcggggtccacctggtagccggtcagcatgtagccctcggaatcgaacagataccaaccataggtaccgtccgtggcctcccggagccaataccagccattggccgcatagctgccgtctgtaaactgataccaccaacgctggccgtctgcagacggctggaaaccttgggtgtatgtcactgggaccggggtatagtcgatgtcgcagagcttgaggaccttctgccaggatgtggccgccactctggacttgatggtgccgtaattgatgcccttggcctcaatacaccaaccatcacctatgtacactccgatgtggcccggcttccagagcgcccaaccgaccatggactcgtccagatggtcaacgcctattcgctccgcggccgtgtcgtggtagttgtagctgccgcggatgcgcccagtgtaccagctgataaggccggaacagtccgtgcagcgctggcctatgtacttggccgccttggctttgtaggtggatgtgtatgtgcctgggttctcccgggcgaggcggtccaggatggcctgggtaaggacctcgcccttggcgccgtagacgtaaggggttcccagcttgtccttgcagtgccgtattaatcctgctgctgttttactcatagtgttttcctccatcaaaaaaaaataaggcccagggacatccctgagccatgaaaagttgtgacgtcacaagttgcgatatcgcaacgtccgcttaaccccgcggcgggagatattggaccaccgcctttctacttctgcttgcttttttctgactgagttccaaaataaaaaccaacaatcatggtaaaaatcgtcaagaactgctcgcctgaaatttcaccagtacaggtaagcccaataaagccacctgttagagccagtgtcataaggcttttcacatcaattaattttgcaaacttttccttcattttgtcttacctcactttatgtattgagccataatataaattaagccagtagccagtgcccctgccattgcccctaccattgtgttaaagattgttcgtttcatactgctccactgctctgccggtgccgcttccaattttgccagcctgtccccttgctttccctgtacctcaatcatagtctgcatgttcaatgccagttccttaaccgacaaaaccaattcctgtatggtcttactctgctcttcctgttcctccatgcggtgtttcagggattttatctgctggtcgtgattttccagctttactgcaatgtccgtctcgttcataatggcacctccaatctatattatttttccgccataatttcctgcttctgcgcttcagtaatccattccttgattacggcattagccaaaccgagcgctgtcagtttcccggaaacatataaccttttcaatctctcatacattttctatccctccaaacttgccactactaatgcatcaacagttgcattcaactcggaaacttcctttttagtttcgtccagttctgcccggacatcacctgttaccagctcgataattaccaccgtagcagtcacatcctgatactcgataatagcgttgccatctgcgtccacagtccctgtatcaactgactccctgccgaccacatagcctttctgctttttacatccaatctggtacttgtaccccttcttaatgtccgtctcttcaccggcgctatcaagaatggtgatggtcgttacgttcgctgccccatcggtttcactatccacctccgacaatgttctatttcccagaagagcaataatcgtcagtttgcttttgtctgcgttctccctgagacctccaggaacaatttcatagatactttcattggctaatttagcctttgcatagttaatcataatgtattttttctcccttctatgcataaaaataagaccttgtaaaaggccagttaataaagtaatcttggttttaaatatttaaagtagcaatttagtgaatttagaaaatagtactgtagtgatggattatgctacggctataaatattaccacgttaaaaacgtggactgaatccagttatgcaatatcatctccaccagccggctttacatttagcgatatcgtatctattaccgcatttgcgcaggatggatatggcgacagatggcttcgcgtcatggcaaatcaacgggctaatgcaagcggaactttatcgcttatgggatactgcatcaatacaactggttcaataccaataataatacgagttatctttaaaaaatgattattatagcaaagtgtacaattaggtcggggttattctcttgctgttccatgcccctccactgcaccaatgcaaagcagcatctaggcttgattgaccattggttgttatgcgcatgacatgcagtgtgttattagatgctttgtaggtataacatgttgatattgtgttatttgcgttgttatataaaacggaatatccaataggcgccgtgttctgaatatagttcatcatttcagccgaacttgtgtaacttgtttcggacgaaaacgatataagctttcctaaattctccgctaaattgctatttaaattatttgccgcttccgtcaaattagctccggcggtcaactgtgttcccattccaatccgctcaaccagtgtatgaatatacgccgcagtcggaatcttgctagaatcgtttgcatcaatgctggtaagcatacttttcaataatgcgttctgattcaaattcattgtcgtggcaatagctttagacaccttgcctaaaatggttgcaattgcttctccagtgataatattcgccaaattaacagcctgagtgaatgtcgtattgacatcaatcgcgccatcacttcccaccttaatactgttacttccctttacaattccaacggttgcttgtgtggccttttttacagataaagaagcatttgcatctacctctgtagtcacaccatcaggcttcaccacgccggcaatgtcagccgtcgccttacttgcaccttttgcagatacctgccaataggctgtatccgtaggcgacgtaccagctggaggctttacctttgcaacgtagctactcccatccagctcaaccaagtttcccacattataatcttttgaatcctcccatgtccccataggaacaaccgcaatcgttccatattctacagccattatactgttgcctccgtttctccataaaatttgccgttttcaatccaaaaacgcattccctgtgctgccttatcactcatcaatttacccgttgtgaaatctatataaaatcgtggaataactaaatcagctgtagcctcaacttctgatttaattgatttacattgctgataataccaaccagcgttgtcttgtgtatcttccgctaccacgccaccaacggcataccgctgagaaagtaatgcgctatcggatgccgcctgtgcctgttcaatcgcatttgattcactagttgaagcagcttgtgccttctccgctgccacctgggcctgctgagtcgccacttctgccttttgtgttgctatctgagcgtcagccgctgcattatttgcagaagctgaagcattggtcgctttctgggtagcaatcgctgcctgtgctgtggcagtttcagaatcaacttctgctgattgcgcgttggaggccgctacctccgcgttggtcttagtctgctcatagtaatacttggcattgtctgtctcgcttccaacaaattccgaatcaccaatagcataccgtttcgcaaatttctgatactgtaaagcagaatcacgggctgattgggcgtccaacatatactggcgaaattcgccttgaattgccgcatccaatttatccattgtcacggaaccgtcaataatctccgcagttactacacggtccttcatcgacattgaaatggttgctgtgctggagaaagtgttgacgaatttggtcaaatcaacttccttggttgtaccatctgctagagtcaaaatcagaacattatcatctgtaatatcgaaattagcgattaccttctcaatgtccaaatcgtatgtggtaacagttccattttgttgggtaacggtaataacgcctgttttagcgtctaccacaattgaacgcaccaggagattcaccagcgataattccgcctttttagaatccagctgaacaatccggttatccgcctcttttataccattttccgcatgggatagattcttccggtttatgggggttttctgtgacggaagattttgccaatctgttatttcatagaacggttgatatgccattatccatcactctccttttccgcctgttttatgtagtctttaataggtttccctgattctagtatactggctaaaagtccaatctttcgtgctgccgctatgcctttacattcaagactatcaataaaaccaacaatggtctctatatcctttttacgatatacaactaattcttcacattttttcatatccatttgtccacctcaaatccagatactgcactgctccggcaagaattgctacataattaccatatggcaatgtatacattccttgcctttcactgtatccgaccaatgtataatcaagccctaattccaacaatgtcgttttcacatcttgcgcaatgaaccctacactatgaatatcactgtctataagcttatatgctaccggttgtaatctggagataatttcataacattccttaggactgattttttgaatattctccttacatcttccatctgaaatatactgccaatcaactccatatactgtaccagtacaatatataccctttgcattaacatcttcaaaagagcctgtgtctgcctctacttctccattacacacaattcctctttctgcatatataattcctgttgcattgaacgttgcagcctttattatcgcgtccgtagcttcaacaattccagatgtattgaccttaaacttcccattaccaatattgatgctaccaccaacaaaagaagcaccgttaatattgcctgaaaagttagcattaccactttcatcaaccgttaaattgtttgcagtaatgataaaattccctgtagttaactctatcctatttccagttatttttagttctgaattcagctggcttgtaacttcgcctttagaaactttctcgtcaacacgcagagctatttcatcagcctttacagataaagaggcttctgcatcctgagcacgcttaacttcagcagtgatttcattagataccactttgaattgagcttcggcatattcttttaagtcggttactttaaccgatacttcctcgactgatttttttattacagctgcttttccctctagctgaataatctctgaacgaatacctgaggtttcttccagttcaaggcttcctttagcttcataggtatccatcattccttgtatgccttttaacgtccgctttaggcaataggtttcaattacatcatctgtcgtataacagacaataccatcccctacttcaacccaaggaagtgctggaccagctattttacatggtctatacaatcgcccacttatctgggtataaacaacatctgcaatttcatttaattcttcacttgatttaccaaataccagaaaattcccttgcactacatagcaatttgtaccctcctcatgcgaccagccaccaacatctccctcctcttgacgtatctggaccttatcaatcggcctaactgtataatcttcataactggtttctgactgtttataaaaagataatgtctctccctgcgacatctgggaagggaataaatcctcatccggaaataaatcttcagcagggaataaacttgcattctcaagtgaaacgtattttactctcccggtcttatctacctgtccgaaacacccattaatttcacatatggcctgtagtactttcaatccactcaattgctccggctcaattgtctttgtaattgacatgtcatcaagtggtaaagacacatcaacctgcccaattccgatatgcccgcataataaatccctgaaagattttagcgtcattgggaaagtcagtccttgataccatgaagcgacatcagtttgaaattttctcattcgattgtaagcggtgattttctttttcctgcggtccgattccaaccttataaaactttttaccctataaattcccatggccatttcgtatccgccaatttcaacagtgaacatgaattctttgccggtaaggtcaatcaatacatctgccacggtgatttcaaactgtgtagcattacactctccaaatttcaaatcatcactttcacataggccttcagtgattgtcaatgcttctgtaagcacctgctcattatctatcacataacatggttcttggtctattggaaacaattcatcagaaggatacagagattcctccggaaataacaattgtacatcttcattgtagaaatacaatttcaaatgtctctgtgtgtcctttgttatgttgtcagccttaaataaactctttatgctctccggaatatccagcatttattatcaccacctaatattctgtgaatgtcaccttaattggtttgtacaaaatctccttcttctcttcatcaaccatataaaattcatatggtacatcggcaatataaaacgcccccgaaacatacgaggacgtattgggattccaatattcgacttcacatctcaccctgttgtcatgcggcaagaaggaattaagtatttccgcatctttcaaatacaaggcagttgttgtgaattcgattgaggtagccgtgtgtggaagcgcagtccgatgcaatactccatccgcatctcgatatgggtctaaatccattatctggtctggagtgatttttagggattcagccgcaataagtctggtggggaacgtctttccatttatttttaacagccatccttcaaaagccataatcatcccctcttagcaaacaaaaacacccaggattacccaggtgttatcatatttctctcatatagattttatcacttttttatgaaaattatgaaacttatttaatatgacattcttctaaacaataccattttaacatatccagggtggcatttgtggcaaagataaaaataatgtagccactctgcataagacagaatggctatgtatgggttttgggcaataaaaaaagccgactgattctcgttttgaaaaccaatcggctatcacttaaatcccaaaaaacttatcagaggaacttaattctaatatttttgctttttcaatatatttctgctccactttatcaatgcgttcccgcaatattgggataatatactgtcctttaataccttcgcaaatctcaaaaattgtttttaactggtttatatgtgtattttccattttatcatgaataacgaattgtggaacattcattcctagttctatactatattgcatataagctaaatcatatgcaacaataactgcttttttctttcctgttccaacttttcctccaagcgacgcaatactaataggaaactttttttcctccttccaattttcgttataagccaacaaatatttttctccataaagtctttgacaatagtcagaaaatatttgattgaatgtcttaatcttatcttctattttttcattattcatttgcttttcaatatcagaaagctcgctattaagattttgacgtatctgctcctgttcttccaacaaatgaatagattgttgtatctctcctttctttaatgataactcttcaatctttcgattaagcatgttcagttcatccagcaatccttcatccaaaacttctatggttattttttctttctcctttaaaatttcggatagctgttttgaatattgttccaataattcctgttttgtatatagttgcactttaataaagtcaatcctattttgtatcattgaattatggaaattcaccatttcttcaaagctcttctgcaaatcaggcacataactttgagcttccgtataaattgctttcaacgtaccaaaatcaatatcccttttctctttggaaagattttcaatactcttatttatattttctatttcaaaatccactaactgcattttttcttgtaaatcattgatgcgtactgttagctttcgttttgtatctaattcgtctctataagaatccatataagataattgctgtcttttcttatataaatctgccagatctgaatcaataatctcaagcgactgcttcaaaagacttaatgatgttatacttttacttttttctaatgcttgaattgttttctggcattcagctattcttcctgcaagttcattctttttgctaattaacttttcggtatatatctgaaacaaaaaactataaatcgcatcatagtcatccgatgtagtcattatcggcagatattttatcatcttatcttccgcagtattttccaatcttacaaatttgggtatcaactgcctaaatgttggatttggctcacttaaattaaataataatttctttaactcattccaaaaatcattttgattataactttcatcaaaaatatacttgtttcctctaggatataaatcccttttaattgaatatattttctcttttttgtctaccaaaatcaactcagcctgaactttatattcactcaaaaaatctttcacatctttattttcacttcttgtatctgaatcataatacagttctctaattgattttgctcctaaacataaatcaattatctttattgttgtagatttaccaacactattgccactttcaataagatcttcaggggtattatctacaatcaaattaagtccttttaaattaaatgttatgtctctaatgatctcttcagaaggctgtgttttgcgtactattaacttttttattttcataatacacctttccttcctttatttttataagtgacagtataaaaatccaatctaaagcataataaataaaatctacatgaatcttctcattgatttgttgttgaacctctaataacatttcttctataagtataactcttttttgttctaaaatagttaataggattccacctaaataatataaagaccgattcggttcacgttcaacattcacaatcataatggtttctccaatattttgcattccataaagcaataacatgtaaaacatgtcactcctaattccatatcctctatgtacataatatctatttcattcgcagcttttactgtctcaaatattttgtcctgtaccatgtctattatcttatctgaattttgtcttattatatcaatatcttctttgccagaatctttgttttccagcaaaatagatcctctttccttcatataccatgaatagacacaattcaatatttttgctttccccctcatgttggagtcatcataagcgtttaagtacccttcacaaatagaataatacgcagaaaaatatcttattatatgcttatacttaatcacatgattatattctatcttttcatctggtttaaactcttttgaatcaaatgtgctttctatatcatcacttgaacatacttctcccaatgattttactaccgctgagatcaacgaaggaattctcacagcatttttaattgaaacttcgatatttcctttgttctctcctacaatcaatccttgattgcttccactattatctattttgtagtcatttcttgtcatttatgaatatctcccgaattatttccaattaaaataccggaattgttcccactatttgaaactcgcatatttcctttattttcgatatttctactatgttcttcttttatttgttccaatatccttttcgattcatttttcgctcttactgctataatcgttgaaataactgtagccacggtccctatcgcagtaaatatcaatgtccaatccatttttttctcctcctaagtcccattactattttaacaaaatttattatactcgtccatatccacgcatcataattttacgttatctaatccattatacgaatccaggtcacaaactccacccgtccacctagtgttatttcgtccataatcccccatcttgtccacaaaatacggtacaatcagcaccaaataacactaaataatgcggttttcaccctgtcaagcgctgggtaacaaaagaagtattgccagctatccgtaaacacggaatctatgcaaccgacaaagtaatcgacgatatcctgaacaacccggatttcggaatcgaactcctaacaaaattgaaagaagaacgagccgcccgtctggcagcagaaaagaaaaacgccatccttatgcacgtcaacaaaacatatacgatgacagaaattgccaaggaactcggcctgaagtctgccatagaactgaacaaactacttgccaaaaagaaaatccaatataaagtaaatgaaacgtgggtcatgtattctcagtacagcgacttgggttatgaggaaattaaacaggaagtcttggacaacggcaaggttatctatcacagaagaattacacaaatgggccgggaatttatattgaatttattcgattctgtagcataaactctccgtatactctgaaatatcacaagagggtgccaataatggcaccccattaacaaatcaagatatttttttgctcaaatagcatcccctccaagtcactgtgctatcgcagcagtaggatatggggcattaatttcaacatctactggttctcccttttatcaaagatatttcaataatattcccagctatttcggttgaagttgaattttgcccccaagaaccacttccaccgtgcaaccatctacaagttgtacattcgcatatgttatctcgccaggcttgattatctcgttaacaatatcaccataatccgtacccggactacacacatgcacattgccctgttcaattccgacaatatcatattttcctgccggaatatcttcccctaccacatacctcccagttgtcaattgaattggctctgtgttctcatcatttttatctattagttcaatatcttcttccgtattatttgttatcaatgagctactttttgaatccgaaagtaaatcctctatatgtaaaattgttgcttcaacatcagcattgccttgagccatcaatgcctctgccacaagaaacccaagttctcctatttcgtgacctttcgttccatcttcatagtgcgtataaaaataccctattgctaaaagaaatttattaaattcatcactatcgttccatgtatatactgttaaatcttctacatatggcaatgactctactaaactattataatatatttgcttttctatgtccgtatttccgagattctttgcagagtcaattatattctgtttgaattgttcggaaatatcatcggaagctgaatttgagtagagactctctactgaattagaattatccaccacctgaatgtaagtatcctttctgtcacaccgtataactggcatatcaactttatcagaatagccagtatatacaccaaacactcttacttcctgtccaacgcaatcatcaatatcttcagaaatatcacctgtaacacatactggaacaatccaattattcccttccaaatcaactaccgataatgatactatattatcaacaattaatttctcttttacggccccatcaatatatacttttgtgttccctaatccattatcggatgcgtaagaattgtacttgctaaaatcagctttttcaaacccatttattatattgtcattaattgttgtttcttgaaccgaaattatagaagccttatgatactcgtcattaccagcttgcttttgtgaacatcctaataaaacaatgcaagacaacaaaaataaaaaatattttcttaacataaaatccctcccccacttgtaataatttaattataacatttgggggagataattcaacatcaatctatacctttaaatcctgtctttccggtttgcgcaaaatgtctcgatacgcctctgcgtgtagcattatagattccattttcgtcaattacaggtttttctacaagctgttcaagcaaatcattatttcgtttcaattcataaagcaattccgcattagagtcttttaagcttgctgtcaattctgctgtgtaatccatgttgatagaaccagtgttaaagcttggcaaggatacctttggtgccatagcatattgattcaataaatcattacctaatgtgtaagtaaaattagaaccaggaaaggctatatgatacccgcttaacgtggatttcatagaatctatccaatgttctatcataggcacggttttgtccatttcagcactaaactcattattaaatccaataccggcaaatgcaccatactgtcccataattttggaagggctatgttcatccaatcccctctttccagttacagtttcctttaattcatcaacctttctcccaagccatgaatcatcccaccagtccttcattccctgccagaatcccttacttgcattggctccagcatcataaagagaaccaactcctttatcatttggattaaactcattattcatggtagttttagctgcaccagcaagatttttagtttcagtctctactgtgctttggccactttttataccttccgccagactatcagccccatcaattccaagcgtcttaagtttttcaataagtccagggcgctctgattcttctgctgatgaaatttgtgccaataactcaactgccttagcctgtacttcggcacttgtttttgaatcacccaactgttctattagagcttctggaactttcactcccaacccggcaaataattcaattaaatgtccttcggtcaaactgtgcccattttgtattccggcaagcaaatccattgtcgaattctgcactgtaggttctttttctgaaaagtttttcactattgcatctggtaaatcataaccaattttctcaaacaatgattttatttccggtgtctggacttcagcaccacttttgatttgcataagcatctttgtaacttccgtttgggcttccggttccattttagcaatggcatttgctaattctttgggcaatgataatcctaaactctcaaaagcactttgcacttcacttccagatgcttgtacaccctccgccaaagatttaaaaaattcttgaattggagtaatgtcaaagttcttatccaaagctaaattttgcatgaaatcttccgatagatttaaatccaaattggaaaattccgtattcaagtcacgtaaggattgtttatattcgttagatgccaatatgcctgccttttctgtttctatagcttctttttccttttgagtacattcatcaatggtacttttcatggaatctaattgatactccgctttctcttgtgtgtctttagcatttttcagatttatattatattcctctgtttcctttcttaatccctcaagtgccttttttagcgtagcaacatcctgtaccccatatttctctgcaaaagcattaggactattctgaaaatctacatacgcctgatttatatctaactgtccatcagcaatctgcttaataacctcgggagcaatccctgcctgttttaagtaattatcaaatgccttattatactcgtcaatagctttgttgacattgttttgtgcttcgtactgatttttgtatgcttcaacaaggtattcttgtgcggcctgcttttgtgcgaggctttcatatccttgtattactgcatccaatgactctttctgaatatctaaataccctgtttcatcatcaatatatttacttaaattaggaataatatccacaaggtcgtctgatacctgctttaaccgttctttctcgcctgcacttaaagaggctttatcggacagctcattatactctttcgccaaatcccttgctacctgtgcttctgccacaccagcggtttcaacagcatttcttgtattatccaagcttgtattaatctggtttgttttttgtgacacttcatcgttcaaatcacttagcgcctgtgaaaattgacctattgctgaacttttagccgcctcgtcagtaactcgcataatacgctgtgcaatcagcaaaataccaccagcaattgcagtaaatgcaattccgcctaatgcggatggaccaagagcataagttatcccatctataatactccctgtttcggccgactctaacattattatcctaaatgtctgaaatgcgcctgagagtggttttaatgcagtagttatcccatccataattgatgatataccactatatgttttccaaaccatgaaaaaagtcataaatgcttgtgtcaaaccttctatgactgacttcggaattgaatttagcactcccgccataaaattaaaagcatttccgataccattaatcaaagtttcgagcgtcggagatacaatcggtgtaatccctttaatgaaattaatgagtccctgaccaataccagaaacaaattttccaagcgctgatgccaaatttttaaatcctgtagctaaaacagaccaattcacatcaatcacgccgaacttatctaatgcaaagacaagcccagcaatcccacctgcaatggcaacatacttcatggggcctactagcttaaaaagtttttgcaatggactatagatattttttacacccttaaccgctgcatctacagttttaaatcccataattccggttgcaactacgccaagagcataaccaatcttttcagctgtatctggcgaaatctttcttagagcctccgctacgctgtttataccattaggaactatgaagttaatgaagtcggcacctacggacaataaatctccaaaaaagtcaataagcccttctcctaccttcgtggaaaatggcgtaagtgcctgccagaagttctttaatgcttcattgattgccggaaaatcaatcttcatcaaaaaagcatttatattgtcaacaagcataggaagcccggtgccaagggtccattttcctacaggaaccaaaaattcactccaaaaatctttcaaagcagtccatgtaaaatctcccagacgagcaagcccttcattccaaagtctctttaaagattccctggttggttctgcggcctcccaaatacgttgaaatgccctcgtgattttatcagctaattcttgggctgagttctccatgttcgcaaatgccttatcccatgccagctgatattcagcaaacgcatcattgaaagcatcatccaacaggccaccagcacctccgccagaaccacttccaccgctaccggaatctttttgcgaattaataacattcaatgtatcgaattcctggaggttgtctgccatcttctttgtgttctttgcagcatcaccggtactatctgcaataccgtcagcagcatcttccatatccccaaaatccgtagccgcagaaccaaccgaagaactaaaaccacctatctttattcccaacaaaccgcctatccaagaaaatagcctttgtatggcgattaccagcgcgtttatgtatggaaggacttttgatactataggcagaagcaagttacctattgttcgtgccaaatttgcaaaattagcctgtaacaggcgtaactggtttgctggctgtcctatcgtatcagccatgtcaccccaagcatatttagtagattggagtaaaataatagtccgtaaaagtgccttgtcctgctgtcccagttttgcaattttggcatctatacctaactcatataatttctcttgcagattcacattacgaatattgacaccgtacttatccaatgttcggctcataccgaccatgccagatgccatatcctgccatacatcctcaaacttaagattctttacggaagctaaatccgctccaatcatagtaagggcattggataacttcaaagcagtttcagaagcaacacccatagaggatgccatttgaccaaaagtagcttgataattcataagcttttccgggtccaatccaagactaggcattccagttgctattagattcccatatgcatctggttgaaatcctgtcattttacctgtcaacgcttttgctctctcactgaaagatttagcataagcttcagcagactcataaccagctttcttccattcccctgccgcattcccagcgacctgcccccatgcagcgtcaaaataattcaatgtctcaatataatccatggatgattctgtggccttccacaatgctttggctccacgaatcagcaagaaacacttggcatagaacataccaatttgggaaactaaaccttttgtagctttggtcgctctacttgcgctactggaatatacgtttaatcctcggtacatcgccgtcgatgcactgctaacccttgaaccatttccggccagactagccagggctgttgtcatttgtataagattttggcttacagctggtgcatgggataatgttgccattaattgggtcaatgccgtaccaagtgcctgaatattaggaatcgccgttgtggccgccttgcctcccagtttagtaatggaagaaacaagattagccagattggttgtatcaaagctaagtgaacctatcccattcaaaccactcacgaatcgcaatatctggtcctttatcggtttcagatttgttgcggcctgtgttgcttttgcaccacctaatctggtaatattgctcacaagattattaagcccagcaaaatcgaacgcgacacttccaacagtattcatactcgtaatgaatccccttaaggctgtggaaatctgcggaagattcttgaccgactgcgtagcatttgtgcttccaagccggctcacgctatttaccagcgatactaatccattcgcatcaaaagttaaacttccggcaccattcattccagtaataaaatctttcatactggttttcagaaactccaaattctgcgtcgcctctgtcactgttgcccgccctagtttggatatggcattggctatgttagaaatcccatcagaatccacatgaacatcattaagccccatcatattagctgcaaatgtggacatggcctgagctgtcgctgcaactccctgggcatctactgttgccagtttattcattctagtagcaactctactaaaatctgccgtctttgttctgttattaaaattctgaatggacgccgatatctgattaattccggaagcaatattacttacattggacatttcaagaccagtaattgtggactggaatttcatcatttttgcaatgaacttatccaatttcgcatctgcgctctgcgtactagcgtctatttggacttttaaatcatcaattacatctgacatgatttcacctaccttttctgcatataaaaaaaggcgggtaactgctttagtcactcgccctattggtttatagaaactatgttgttaaaataggcaaataggctgtaacacctacatgccctcatttttctttttcacatctttctcaaacgaatccgcaaaaccaaggaatttttgtaattctttatcttcttcctgccgcctttcttcttctgtcataggaattacccgatatggcttttcagggtatttcccttttcctttgcgtttaacgaaaggcatcatgttacatacagttgcatctaatgccgccataacaaactgacccatcatccacatttcatcacttcgttcttgctgtttctgtccatatgctgtaataaacggaatcagttttgttggattgaggtgccagaacaattcataagggacacctatttttagcgcaagcggaagataatgctcccaaattattttgtggaagttgacttcctctttcggtctgtcggaaccttcggcaatgtggaccgttctgtctccttttctgcttcctttgctgccttttccattgcttcggacatgtccttcagatacttgtccagtccggtcagtttgaaaaaaccatcttcctccatgcaccccttcaggaactcatacattccaggaaaagttgcacgttcatcatttggattttcttttacaaactgtttaaacaactgccttgctgctttttcatcttcaacaggattattttccagcagacccgcataaaagcaagtaatggacagggacgccatatcggaaaacatatcggctgttccgtccatcatggcctccgccatttcagcctttccctcttctccagtgattccacgcttcataatgtagccgccagaaaccactttaaaaactttgtccacacaagccttatattctgccgcatcaaaggaaaattcaatttgatattccttgccaccaatcgtcaaaattctcatgttcatttacctcccagttttctttatgacccaatctgttcctttggtgtaggcttaattggctctgcccacccaatttccccagttggtgttaccgataccgtggtgtcccaggcactatccacatcagttgcggaccatcctagacttgatggagtacaggtaaagaaaaatgcctcagtcaatccagggtggaaaaattccatccacatgcgtttcccagatgtttttgcactttcgtattcggtacaaataccattccacatctctcggaatccatcagacattccgaacgtaatcgcaatcgctccacctgggtctttcagtccatcaatgtaacgcttccaaactgtgtcgttcagagacgtaacatcgtaagtcgctgtttccggattgaaatcaggtattgactttgggtttggcaggtcgataaactttgatggtttttggcctgccgtcccttcaatcccatatccaacctggatgcctgccgtagaaaggtctataaaatttttacccatggttcatatcctccttaaaatttggaataaaaaaagaaccacacagtttcctgcatggctcaaagttatttagttgctatatcacatcgccctcgcaataggttcttctgaaccttgctatccagcgatatgcttctgttgtactggaccgttctatttcagtcggaccgtaattcattgtaaatcccatcttctgcataaggtcagacgccagaaagattagctgcttcgctttggtacttgaagtagaatcataaatggtaatctcaaaagcagcttgtatggcgcattgcttattctgcaaggaagaactggttgttggctcccccaatgttttcatgtacaaatacggaaatgccgatggagtgtcattcttagttgtactgctacctttcagatatttcttcatctgctcgttgtttatcagtctggaatagaccagtgaggaaatgtcaagcattacgagaacacctcctttgcaattgacgctacctgttcacggatagccaccgaagcgctatacataggcatcgtggctttcacaccgtgagtgtaatgccacttctcatcttcgccccagtaataccatccatcttcaaaagcatgaatctgtccggggaaagttccgattccataccccatttccccagctttcggattgtctgatggattgtagaatacgcccgcaccaaactcaacgagcaaaagcgtatttacggtgccataatcatttgattttgtctgtccagacgcaatcagcatggctttgcagcctgcctttgatggttccatatcaattcgcaaggagattgtcttacccagcggagattctccgattttcgtctgcgccacggtcaatccaacttctgccaaccgcttacacaacagttcagtcttgcggtgcaagtcttgtttgtagtcttgaagttggtcgataatgctctggattccctttgaggacagttctccacggattattcgttttcccatacaaacacctactcaagcaacggagacagcggcataaccttgtcataggttttctcgaatatatccggcttgcatgggtaaagttctccgtttacgccttgaatgatataatctcccacactggcatgatggacaccctcaagcgttttaataaacagctctacgggcggcaaatcacactccagactgtcatagtacatgacgccatcttcaaaagcctttatcgcccattccggaacataccatttgccgtcttttccttttaaatccccgtcgtactgaaatgcttcaatctcaactggtttcttcttatatttcgccatcgtcccgtccctccgttttccacgtctcctttaaatgtttcaagacatcaatcaaatcatcaatggctttctcattcttaaattccaaaatacaaggaatcatttgtaaatcaacgctgtcttctcttatcggtcgatgatccagtataactgttggatattgttcttcctctccttctcttcgttccagaatggctgaataaatatccttattaaacgttactttgcactgctcgaatctatatgtttcatgccgaatcattttgctttcccttccgtcactttccgaatcgcatacaaaaccgaattcaaagactttgccaccttaacaaccttataatctggcttattggtcaacttcccatctgcaccaaattctggtttcttatccacgaacagcaccgacaattcatcaatcggtaaattcatgtcacaggtggcaacagttttgtcatacgccaaatcaacgccgaatgggtccgtattcgcttctcctctggcggctgatacatttgcccgaaactccacagggtcagcatatccaacggtaaaatctcccgttataagtggttctccggtcacggggtcatagatgatgttaccatcaaggtctgtctcatagaccggaatgtgttctgaatagagctgataccacatcttttgcttattgcgtttcagtcctctcatagtgcccaccgccttatcactcaaccagaacccaatcctctgccagcatatcagcctgtgaagcaagccatcccatctgcactccagacgttccgacaaaggcaatggctttatttccgattgcttcatgctccacattcacagcgtttccctctgcgtcaatatagctgatattagttgccagctgaatgtactgattttttccattccagcccttacgggcaacacgctctcctctcttcatacgagatattgcctcgccgaatgtaaaagtggacacgtcaagtcccgtaatggaatccccgtcaacaatttcccaatcatcgaccatcatgtggtcgatatcaacaaagatacactctgtttccataaacggaaccttagagccgtctttacaatacataacaatggttccgttctctttgcgccagaaacctttccatgatggtcttttaatatctgcgccctgcttcatcgcctcataagcttctttaaaaatcattcttccttacctccattacctccacaaaagaaaaatgcgcttgcccaccaccattcacagcacacaccctgcgcccggccggggaggtatcggccagacacgcaccgtcttaaaggagagttaccttactttatgcatctgcctcggccacttcgtcaggatgttcctccgcccacttatcgcactcagcttcaaatgtagtaccagggaatgttttccagccccgcgctgcacaatacggacagtcatccggatgtgtctttcctgttcctggtccatactccgccatatgtgccttgtaatctgtttcctctttcgggttctcaaaatgaatttctctattcttgtaatcgtaaatcatagttaaaattctccttaaacggtttataaaatttttgccattggtacaacatcaaaatagatatcgtcctctttttcataggcacggctaattccattctcgctgtgagagctttcaccatcagccccttgtttcgcccaataataaacagcggcggcaaatatcgtgtcccgataccgctcaaccgctgtctctttctccgtgtccgtgtatccaaacggataccgcttcgcacaaacttttcggattgctctctggattaagatgaacagaaccgacacatctttttcggccacctcgtcaccaagatatgtaattacatcatccagaatctccgcttccactcatttcacctcacaatcaacctgcctttgcggtcaccgttgcgctaccggctttcagagccttgtatgctgaatcgcactcaactacggtaatggtcttcccagtctgcgctgtaatgtcatcagagccatcccatgcagtccaggtctggacattctgaccgaagacaacagcggttacggaatcaccgactttgtacttataggaatttccacttgcctttgccggggaaacagtcagcttcgttgctccacttgcagaaccggcggatgattccacagtcagagtgccaagagtgttctcagcagtggtaaccgtagcgattaccataccatatacgtccggaagaaccgggataaacataccagaagctttcgtccactttgcaaccggatccttagtcgcccacatggtcacggttacaaacattttctgcaatgcttcctggaatgcagcatactcagcctcctccggagtcggtccccacaaaccagtaccagccctaccagatacatccgccgtatagaaggtaaccttgtcctcatcgaagtagcgaccattcactctggaaccatcagccttgatgtaggcatatctttcatcacaggcagcaatttgaaggccgaactcctccatgatgatagaccgaagttcattcatggtaaccagtctacccgcattgatattaccgtagattgcggattggatgcccttgttctttctcatgcgctgaatctgggtatcagaggtcagcattctggacggaattttaccctcatccttcagcattttaactgccttcatgatgtcaccaaagatatcatattctgggttagaccaatcaccaaaagtgattttatgagccacaggaacaccaaaatcaatcaccatatccagattgttttccttgattttcattacaccacggctcattgcctgacctttggcaatcttggtacgggtaacaacgctctcggacagtctgcccatatcgtcaaatacccagttcaccagaccgttatcatccggtacaccattgttgatatacatctgaagctgctcggactggttgattttctccttgataaacagtttctcagtcagaaccttctcgaaagttggcctggtaccgatgtgcgcctcggaatccagcgcatgcacaaatgcaggagtcggcaaattctgtccctgcatcagccgataatactcagccttgaagtgctgtgtcttcacgtccgggaaaatggtatccagaacagttggccttgcaacggagaagttctgagaaaaatttaatctctctgtaacattaattgtatctaatacattaaatggcatctttacacctccaattaaaattcacattctggagcatcaagaattacaaatccttttttctccaaagctgtcttggcttcgctggacaacggcgtctttaatctattttcatagattcttccagctttgataatgctggctggacgatttgtatcgtcagtcatatcaacggtttcaaacacgataccggttgccgtgtcatcattcgaagggaacgcagtaccgccataaatcagtttcttgtttcctacggtggttgccatcgtctgagtaaccatctcggttttctgaaccagaccaacggcagattctaaaaaattcggcaggctatatccctgctcaaccttcatgtaagccatgtcatatcctccttaaaatgtcattgtttgagtcggcaccgaaaccggagtcggctgtgggttatgttcctgcgaatatttcttcgcatattcagcggccgcactcttatctccgcctttcgggtccgggtcgccaccaccacccggattcggagttttgtcaaaagtttctttctgccactgggtcttgttcgcttcgtcgcgtttggagattccattgacaaaagattctgcgctggtctttgccgcctccaaatcaagcccggataatgcgccaatcatcccggaaaactcctcgccggaaaggtttgcttttgcgaaaatcgcttcgactgcggaagttgtaagctgcttctgtaaatctgccgttctcttttccgctgcctctctggctttcttctccttttccaattcggtaagattctgttgctcaagaccatcaagtttggtttgcagctcctccgccttttcagcttcttttttccatttctcagcgtcttcctgatatttctttacttctccattgtgctgatttaggtaattggttacctgctcatcagtaggctcctcgacgccaagcgcaaccagattcttctttgcctgttctcttgtcatgttattcccctttctaatccacgcttttgattacgcaggttgctcctgccggattctaccatttaacggatggctccatattttgaatataaaaagaagaagtctactcgacttcccctcttttaactgagttattctgtttttcaagaagcgctatcgctctctctttttctgcctcagcatcaagctgaagctgtgtcttgaaaatagtatccatgtacggcttactttgcgtccaaaccttttccgggtcaccaaacagcccgcatacagtaattgcaatcagcggatgaatcttatttttcagcaagtaatccaacgattgggccttaaccaacatattgtcagtggaatttctagtggttttcacatcaaaatctctgacagtcagtggcacatcattggttgtttgcttaattacattcagaacgatttgagcatgtttcttttccgcttcgattgtgaacggctcgtccagcttcgctctctgctctgcaaaatcccaaccatttctcagataaaccgcctgtccggtatcaccgccggtattctgctgccggtctggcattccttcaacgacaagtacctgccgatatacatcatccttggctacttgcgtctgctgctgattcaattcagccgtcatgagttttacatctgattgcattccctgaccggaatctttaacctccacagcaccaaggtcacacatctgtaaaaacttcttctcatcaatctcacagttcttaaaaagcataaatgcctgaataaactgctcaatgccattcatcctatcagactgcattttgttaatctggtcgagaagcgtaatcacaatttcaatgtcggagagcctgtccggattattcggatactccacaatcggaataccgccaaaaccatttattccagaatcaattactctaccgcctttgatgatgaaatataaatcatccgaatagcactgataatactgttcgtccttttcatccttcaatacctgaatggaaagcatatctgaatcatctttggccgaatacacaacaatcgtattcagcggattcggaatatggattcggaacggaacaatatctgttgactttcctttaagcgttaccttgtaggcagttccaacggcactctgaaaaattccaagcttgatatctctggcctgtcgatgagcgtccttcatgtaatcatttagtttatccacggcatcattgatttttttatctgtttttcggctgacatactgtatcggctccccatatgtctgactggtactgaatcgaacaatctcaagagcatgattttcacaagtcctattattgatgtcaggccgcactttcttttcacggtaatgaatcggctggtcacccttgtagtaatcgtaaagataccgtatcgccggtcgattgtaattcagaactgaaatggccttaccaacgacaccaacaacattttctttggtaattctatcgacattcgtatatgcaatttttctaccaaaatgtccctggcataaatcaataaaactattactgttcatcagcttttaccctattatgtcaaaaaagtaaggccgttggaggattttctatatccttcaacggcttgcatttatttcaatattaatagttatatcaaacatccttaatttgatttggatgtctcgcatactttttactaataccattttaacatatccagggtggcatttgtggcaaagatgaataaagtagcaatttagaatggaaattaaatggtacatacaaggccacagatacttgcccgttacctgaaaaatataatgagttgatgattaagatttaccgtacttcggattacgcatatacatgtggtgtcaatatattaaaagcagagattggtaaaaacactggtaattggatgactggttgtggtcgtgacgcaactggttgggatgtaaaaatagttatagccatcaccaatacaattgcaataaattctgtttttataaacgcagcagataataaatcagctttcagctttgtcgtttattaccgctaataatcatttaagttcccaagcgctaaatggtgatgagttatcggccgcgatgcgctggtatagtgcattattaattgtaatgtatgtctgagagacaaattgattacacacaatgcttttaaaaacaccggtctcatttaccgggaaattataggcggtcagattcccctgaacgggattgcagtaaaatattatgttgtggtttctataatcgtcagcgttgtttttacctgaccatagaccattattttttataagcagcttatcagctaaattgctacttcttttctttttgaatcgcattcagaaacttatcaatcttaagccctatggtcctcctgctataattcaatttcttcgctatttctccatcggatttgcgttctacatactttaatcctaaaatatgcttaatttcaatatcctcagcaggtagtgtttccaaaaaagtctcaatatctaatttcatatcttcaaaaagttgttcattacctttgaggtcgataatcaactggcgtaccattttttcccgttctgagttcgactttatagttggaccagaaaccacaaaatgacattcagtaaatggaaactgcttcatagagccttttacgatgccatactgttgctgaaccggatgattttcataatattttattctgccccgaattcttttgatttcagattccaggtacacataagttgccagatactctcttgtcaaagcttgcatgattcttgtcctccttaattcagaatggtcgtgacataggctttgctgaagctacacctccgccgcttctgtaaacagctaacatggctaccatatcgggtgcatcatcgtgagcattcttcgccaactgactgtatgcgcacaaccacgacatgaattgcccataatcagatttaacctcataacaatctgggtgcttaaatagcacatgctgaattacccatggactattgacgataatcttcgtttccttattggtagttgtgaatctcttttcaatgctggctcgcccacctttttcttttactttttcctgaaccttatcgccggttctgctaccctctttattactttcaaataccgcaatctgaacattgttccgaaccaggcattctgcattcaagtcgtcaagcaaataggggtcaatgctctggaatacaacatcatgtagataataatcctccccatactgatagaacacccctaagcagttataatccgtacccgtatctttcgtatcgcagaacgcccatatagcatctggctcctttggcggcagctctccataataccgccgtaacatatctggattgtagaggattccctcgcgttctacgggttcattcttgtataaacacttatatgtaatatcatccagcgacttttcgatatcttcaaaatactccacatcgaatccaacgccataatcataatcaaaattgctttcccctgttgccgggtcaatatccggcactgaaatgaaacggcagcgcttattactttgatagatagtttttatacgcccaattacatcccatacagaccatctagtcgcaatatgaagttccttgcaggttcttcctcgttttccctttttctttctggtttttaaatctgtactatacatcgtccagagtttatccagacgaattttagaaagagccatttcaataccagaacacaagtcatcacaatacagaatgccctcacatcgggtaacacctgtctgcgaagctcccaacgctctgcaggtcagtgtcttaaatggcttaaactttccaagattgatttcctgttcgtttgcattgttgctttctacctcaacatttggaaatatttctctccatgtgtattccggcatctgtccgggcttcaaaccaattccaatgatattgcaaacaacctgataaaccatccgggtaacatgaccgctgtgggatgaaaacaggttacacaaatccggaaaccatcccatgaacccagacataaacatttctccgagcgtggtctttccgctcccaggtacggtagatatgctcaaaatatctatttcatcatcaatcaaatcctgtaatgcttgcgtgaaacccattttcaggaattgcttgcggcgtggctcataaaatctatcctccgggtcccgattcttctccagataaatcaagtagctatccaccacacgatttctggcttcaaacaacattgtatcccagtacagtctgtcccattgagggtccagcgtctgctgtaagcgctgtagcgaccaacgcttaatgaatcctgaataggaaaacacatattttcgttcatctgcacccaaatccgggttatcctgcatcgtatattgaagttcggacagaagaagttgcaaaatgtccaaagatggcggctctgtaatctgccgctttaattttttgattaattcccggtgttcctggaaattcataagaaaagcctccttcctctgtttatttcgcaaaggtcgaaggctcactaggcactggtttaaatcgacataatttttaacttaatcctgttcaggatgttctttctgccatttttgataataccaacatctcgttgcaaggcccctatttatgccgcgaagaatatcataattttcgcattcatattctttattccaaccatgaacatcaaaattatgccctaagcaaagtctacgaactcttgattttgcccaatcatcgcagtcatgtttcttcccaatcataaatgttgccgcccaaggtgttgcattgggactacaatagaaatacaacggccaccaatgtccatcacatagaaaaggcaacctaaaacaaatatacccgtattttttagtatgtagttgtactccccaatgcatggcatttctcccatatactgtaagattcccaatactaatatggcctgtcataaaattccacttcatgtaatgctttatcttactccacatttacaattatctccttccgacatctactgtttttgcacttatatggcattttctctatccgcgtatcagaatttactttaaactgttttttctgacaataaggacagataatccatccgtcttttatatccgcttgcccgtcaaatccatcttctggcggattcattgcttttgaaaaatccatcttagtcccttccatttcaattattgataacctattatcacccatgtaacatatgctacaatgtccatcgtcacattcaactttaaaaggttctggtttgaatacggcgattggcttctcaaaaatatattttcgaatgattctacaatctgtaacttttttcatatttgcattgagtccttctgaaatcaacctgtgctcctgcatttcggctggatataagttttcatcaatttttattgtacagtgtctcagaggaatatcatattccctttctggacttaaaagcatttattccatcctcccagcaaacttagaaaatatagttccgattcttatgagcacaatcgtttctcatcatgagcgttaagtcgtttccacttacccacgccaatgtatttccatcatcaaggaaagttatctcatattcgttctcgtcctcatatgttccaccaagtgtttgctccatgtattccttatagactttactgacataagcctttctgttaaaccacgtatcatcaacacatggtacaactttgattccgctttcatcaattaccatattctgttcgatagaaaactttgtgcaaagaacaatgtcccctttattaaaccttcgtttcatttctctaacctcgtttcaaaccctgctgccatcagtttatcattgatttccaacgcatatccggcaaaacattcctgatatcggtttccataaccatctgcgtatttacgcagttctctgcgctttatcggcgctccgtccgacaagagcaatttgatgcaataagcaaaagtctttccgttattgcgaccgtattctataatatctcgctttccaagaagataatctttctgccagttatacaactggattccgaaagcctgttcaatccttttgattactttatcgtcaatcttcattcttccttacccacatacttaccggaggttgaccgccaatcacagataaatgaattgctggtcttatacctgctttcaactgtttcaaaatcgacactaagtcatcatctgaaagctgccacaaagaaatcacttcgtcagtcataaactgctcgttatactgattgcaagctggcaaatcgtcacatccatctgctacaaatacgctattctgttctggaaattctactggatacattttacctgctcctttattcttcgttctcactgttattgcagtacgccagcaaatgctccgcaatctgccgcaaatcacttttagaatatttatctatctcatattcatctgacatattgggattaaacgctttctgaatcaagtttgttcttacagttctcgtagccttgataagcatagaagctacatcaataggctctgacggaagaagcagtccctttgcttgattcaactcaacacagcacaaattttcatacaaattccgagaaagaagttcccttgcctctccagaagaattttccataagagtatcaaacattttggttccatctttcatcgtcaattcctgtttcaatttatcagaatggcactgtacttccagtaattcggcttttaggcagtcaatatgtgactgcatttcagaaaccagtttatctctctcctgttttgcattatcaaaagccgttttatacttctctacctcatcaaatgcttttaatattactttctcataatccgttctcttgacataatcctttttgccaatatctatgagtggacattccactgaaaaacttccatcatctgttttcgatatgatacttgccatgctatacctccacttcaatcaaacaccgttcgtccggcacttttcccccaacgtcccatccgctgtgatttctaaaaatttcttgcttaccacactggcctttctttaaggttctaatggtcgaaacatttaatggacactcacagcagaacattggacgcttatcagctataattttctttatttccatttcaggcctccctaggacttggtgtcgcatttaagatttctttctgataattgattttcacatgctctaatcccctcatatatcctttcacaaaagaaacatcttccatgcacccacaatttttgcaccgatacttcggtaggccattgattttctcacgttcaaactcatgccgccggcaggattcctctttctggttattctcattgatgtcctgaagaatctttattgtccgctcatccattcctttactccgggctttttcaatatcaaacatagaactacctccgattcttcaacttacccgcatggcaatgccaccatgcgtacttaactctgcttttttgataacagacattacatttttctcttaaataccgtttcatttcaggataatacagccatgactttataaaatcaaccactcttgctataatcaaatttcattcccctccttactaatccgcacaacctctttgacaaggttatgcggtatctgaatcacagtaattaagttctggttatggaatatgtacgccttatccccgtaaagccgaatctggttcgctctacgattatagaaatactgcttgtccacccactttttcagattgccggtcaaatccccatgacgcagacctttctcatatgcgatttttgccatccgctccgaagatttatcattcagaccgcaccgctctttcaatcgctctttggcgtgttttgtgacctgcatacgaatgtcctccaatccttacttatcacatattgcacagaccccgagaatgtaatgacttctggaatccattgacgttgtaacttctacgcaatttccatttacaatacacatcggtaaaatatcacatttatcgcattctgtatctttttctatgtattcaggtgctataaattctttgaaatatggacagccaatgccgtgtacttgcagtcctacttcattttctttctggcactggtatatgttgacttcatcatttgcttcatcgtcccactcataatcaatatcaagaaactcacactttctgttcatcgtgctttattttcaataataatctgacttgtaagcaagcctttgtattattccctccgttgcaaaatgtggtaaatgccaatctatattttttccatagtttacagtaaaatgcttatcaatcaaagaataatacccattatcaaacgaaattaggtcctcgaaatctttacttccttcaacaagcttttcgataaccttaatcagcgtttggtctgacattcttgggtgaaatcctcctgtatgctcgtgatatttgtcaaaataataactgatggtatttattatgttctctactacactatcatcatcgtaaaataatttatctcgacacaacctgattgttcttgtaagcacttcgccttttacgtcttttccatcattgtggaacacatcgtccttcgcaccgattctatcggtcggagtattcgctcctcctttttctttagaaaaagaatttagtgtactctttgatgtattctctgtatagtactctctggtattggttggttcatcttgatttgctcgaatgtcgcaaaatgatacgtccgtcgtatcattttgatacgttcgattgttcatcatagattcctcaagttttttataatctatcgaataccattttgtcttatcaaacgaatatgtattatgatttgcggaaattacatatccgtccttttctaattttgcaaaaatccgtttaattgttggaatcgaccaaaaaggaaaattatctctttgccaatcctcatatgtattaaatgtccagtatcttccatcaataaaattctttccgctccgctcattaaactccaaccagtattcaatctggttgagaacaatggcttcattaagcccaactaacatagccaattcttggcgaatgttgagcattctatctttatttataaataaacttcttgctgtcattttaattacctacctttcaagtaattgcctcaatttggatttaggcaaggaaacggttaaggcttaccgctttcgtgttgcaatcactatccttgcctaagttgggctagttggattcgaaccaacgaatacaggagtcaaagtcctgtgccttaccgcttggcgatagcccataaatctatgcttcttctacttgtccaaaaacttcacaatatcgcttaacatcagtaaatccaagaatctcttttgctttttctactgattccattctaatatcagagtaaattgtaattatgtgaccatctccatatgcatcttgataatcttcaaattcacattttgccgaaaagaagtttcttctaagagtcataaaatattttctaccattttgttcgccaattacttccgcattatttgttctataaagttttccacaaataattgcagaagaatgattggtttctctaataaatctcatattacacacacctttacgattaataaacttttactacaatggacactctgggcatcgaacccaggaatatctggttatggaagggtagtcacctggttttcgctaaaggggattatcggacttgaaccgatgtacatagattaacaacctatcgctatgcctctcagctaaatccccagaacgggcctgcgcccgttagcaacatttttatcgcgccatgcgtttgcgctatggagttttctctggattccagataaagattaaatctcgcccttactcccaacttttcgcgtgtatacggcggcttcgcgccatcacatagtgcatacaagaccagttcggtttcaagcatttcaccgacaacttaaatatgtgcacatatccagtctttcccggtgtcaagagggaatagtcccacacagctcaccctcttatggtctgcttccttattgtcgctttcgcttgcctccgcagagtgacaacaccactccgctctttcagacctcttccacttttgtccagctacctcgcaaaactggacggacaatttcttctcacccgcaggcttttccccttgccttatcggttcacatacaaaattgccacaagtattttagggaaaatcttagcaaggtttttacaagaaccgctgtcacgattccaggaaccttttctccatttggagataggcaggggagagcctgtctacctctcctgcagcagttagctcctgcttgccaaggtcggtttatatggcttatccggctgccgcccatcttatgtctgcaaggacatgcaggatttgaacagtttactctgcgcgcaaaagtgcattcatggaactcccatacaggtgacacgtctgccaactattatccgactgcctcaaacaggaagcagcctgaccatatactgcatggtaaaaacgttccaagctatcaaccggattcgaaccgacaacctatcgcttacagggcgattgctctaccatttgagctatgacagctactacaaataccaatgataaccactcattggcatggatactcccctgcgtttaccgttccagacggattgcaacgcccagttctcttgtgtatccttcccaggctgtaaaacctcacggcggtcgtaagccgccttaacagcctattggctatgaggtagaggtcaagtatgaaaaaaatcaaatccgcatattcagcacaagtatgcggaatagggagaacaggaatcgaacctgtgacttcggagtgtttcgtcggcttctccgcactctaccactgagccatctcccttcaatccggtcggaattatgccaaccggatgttttaccagatatggtaatgttatgcggcttttcagcaactaccgcatttcaacgctacctttggccccgattcacgagataatgtttcttgggattccacattattatacgcattatctaattgaaccctgggcaatagctactctggatgcctcgaccgctcacaagggtaaggaatcccgtgcttaccggcttgattcggtcgtattgcctgctttacaggactttcatttatgaattcaacccactcccacgtaatagggaacaggacaactctgaagtaagtgaaaatcattcaatcctccaaccatttgttatccaaacagataaatccaataactgaaacaccagtcaatataatccaaatgacccaaaataatataacagggaaacctgaagtcaaatacttaactgttgcttctatgtcctgttcaacgtaaaacggcgaatcatctttcatggttccatctcgcaaatcggtatagactgtgccagtatatttcggattacatccataatatttgaatctcacaaatccagattcatttatcgtgtctatgtaatccgttccaggcatagccactttgggataatccatctcaataccgcaaaatctaattttatggctatggacttcctcgctaccggcataatcccattcccagtatgtctcggttcgtgtttgtgtcttaccgttggagtccgtatatgtaaccgttcgggtgtgcatattgtaatgttcttctacctttttcacgtacaggtattctccaccgatttccgggaaagtgacggtatcaaccgcttctaaatccccatacacaaatgcgttaccaatgttggtatccattccgtactgaaacatttctgtctcagttatcttcgttgccttgtaatactctgcattcttgtccatctgattttcttcaatctttccagaaaacacgaatccaagaatcatcatcaccgcaataatggtaatactggccagaatctcatgcattgttatctcaaaacgtcctaactgccacgactttttcataatcattcaccaaataaattcgtaggcgcatcaactggggcctgatagtccaatctctgataatccagtacctcatagccagtccaagataaaaactgtctggccggaaatccttttacataccggttatatgtacctacctgcttattatagctctcacgatactgggcaatcatattttccgtggtagccagttccgtcataagttgcttgtaattctcattacttttcagttctggatacgcttctgctaccgctgtgattgcagtagtcacattctcgatatctccggcacttcctctaccatccacaatagcctgcagcgtttcagcctcgtgcttgtcatactgcttaatcgtgtccacaaggttcggaagcaggtcgattcttcgtttctcttgtaccttgatatctgacattgaggtttcaatagcttcctccagtcctattgccttattcctgcttccttgaacaccaaatacgcacatcagcgcaaaaaagataattcctactaccacaacggcacatgttttccaatttttcattttgatttgcctcccgttcttaacagattaacaattattccgacaatgatatgctccgaacaccatcacattaatttctttttcattaaatccgcacctgttcaatctacgaactatggtatacttctctttcgcctgaagcttccagagattcttccagaatttgtccaaacatccgacacaattcctcactgtctccaacaattcttcaaacgataattttatcttgttcaaaattctcttgaaatcaataaccatcatatttactgtttcaatgattacttttttctgttcttctgtcatgtatatgtacattttacggccacctccacaaaatcaatccggcacttgccagaaagagaaatatcatcgcagaaaatccaaccaaagaagcaacatccctaacattcttccacaggaaccatcccgtgattgccgccataataatatctccgcaggtcacaatcgactcaattacttccatggtcatcctccaatccgataatccggttcaaaactcgtcttgacatatcttctatgtctggcccatacgtgccactttctcttaatgaacttccaatactggctacgaaaccatcgtacaaatctccctgtttcagaagctcatcccgaaccgtcacgattgattcctgtaagtttgaattaaccgtgagctttattctgtccttatcaataaatgcgcatgacatcttagcaccccctatttcaaatcatccattgaaaacacaattccccggcaatacggctctccatcctcgtacaccatgaatgtctcatgtggaatgtcagtcttgtacgtccatgggataacatttccgtcctcatccttggacgccttgtcgcaccataacgcttcaatgcaattttggaaatctgctttatcatcctctccgttataaacaccagacttagagaagtacaccttcccaccgtcaaaacagtcgccctcgtctcgtaatgcaccctcaaactccatcaagtcatctgacgcgccggaaacgatgacccagccgttatccttcgctgtctgaatctctttttctgtaaacatcggatatccatattccttgccattaagctgctgtgcaaattcttttatgctcataatgttacctacctttcttcaacccttcgggtaactcctgtatcagcggttctccccaaatatctgccagactggatttcatgaacactggaatgcctgttttacgacactgctcaacaatatcttcaacccactttctttcgggttttaccttattttttcgttttcctgtctcagctccaatgataacccatttcggtggagagtctttcaatgcacttccaatttctccaaaaggctcaagaattggctctatgctcaaaaatgtatttacaccctttccccaataaatatccatatggggactggtaacagttgagccataccacatattttcatatacgggcagtcctatttcgctgtatccaagctgtgcatatcgcttcggattctttgtcagaaacagataattgtgctgcggagcctccctacacgcattgaacacgtcaattatctagtcggtaggaacccactctccaaacaggtccgccatcgagcatacaaagatattcctcggtcttttcttgtccttgtactcgcccagccggtaataatgaaacgtcggctcaaatccaaacggataaggtgtgccgtcaataggattatccagaatatgtaacgccgggttctcattatgatacgccgaataatcagggtagttttttccgaatctgtttgaaattcctcttgcataacagtacgggcaatcatgcaaacatccagtaaccggattccatatgctgtcgcaccagtcaatttttgttttattcatgcctcactcgcctctctcctcgaaatccacgcagtcatcggaataactgacctccagaccatagttctcactttcctcattatcgcatacccactcaccatctatgtaccgtcgatattcgcattttccgcacatgttatttcctcgactttcttaaaactgtttgccatgcttatatggacgagttttgttaaatctatgcttctcaataattgcagactccaaatcaattccataaaagtctgccatgtcaaaacaccgaattacaacatccgcaagttcagctggaactccttctggtttgccatcttttcgataataaatctccgttgcttcatgtccatcacgaaattcttccagaatttctgacacctcagaatgaatcaacgaaacaaaatcagtgcacttcaaaccggaattcctgaatccatgtgctgtattattttgtcctacctcttttgcaaattcattaatcttcaattcactcactgatatccctcccgaaataatcatctgataaaatctcatacattttcacgtcataaaactcaccgtcaatcaaccttgcatgttgacgctggataccaacaatacgccccccatatcgccgaatcatccggtcataggttttctcaatcggattgccgatgacaacaacgaataccagtttcctgaaatggaacttctcaaaaatatcccgaagagcctgtcctgcatccattccgaatgttgctttattgtccgtaaagtttataatgttcaatccatccacgacaccacttgacctagttatttcatagcctatgtatccgattaccttgccggatgaatccagcgaaacaaattgatgtttgctccaagtggaatcagtaatctccatatcttcgtaataactcgtgaaattccagaatttatatttatcctgaaaccatattgacctgaaacacttctgcagctcttctgcgtgattaatcgctaaatctaacatgattacgcctccctgtatggcacatgatacttcggcttattcacagctttatcatcaatatagacatctgcgaaaatcttccggcaatcattaccgtgccactcaatcatttccggcaaattctcattcactgcatcaaacttcagtccatgttcccagcaccaatcaaccgcttcaaggagccgttctccctctctgcaggaccagagaatgactttatttccctgcctccggcgtttcttcaaatgctcaataagcaccaggttcggagcgccgattccagggtatacgctttcgcacaaggttccgtcgaaatcaacggcatagattgtgtatttacgcttctcgctcatatagcgctccttttctacttgataaattaaaaacccaaaatccgttttctcctgatgatatacacgattgtataatctccatcttcgcattttaccgaaacggttcccctgtactttttggatatgtctctgaaatcctttgccatttcagcatcaggaaacgtataaagtctccaaagacaaccgttattatcataaattggtttctttgctatcggttcgctcccatttccagacggaatcagaacaccaatgcttctacgcccgaagtagaaaaacaaccagccatacaatgggatttcactttttccaaattccggttcatactttggaagccaccatgggtctgttaacgaaaactggaaatatatctcataacattcttgtgaagaaaagtctgctaccgaaatcagaaatgtaaatctctttcgcttcgcaaacaaaatctttttattgaatatcctcatggcgctgtcctttcaagaaagtctttttatttttttcggaattgaagggactaactggcgccgccagcagcttcctacagaccccctcccgccccatttgcatatgacggttgatttgttgaaatactgcacaaattccagtcccaaaactatgcatattgctgtttcaaaggccatcatcacttgtattcgtttcaactattcgctaaatatcaatttcacgaatagttatggttgaaatctacacaaaatctgttgataatcttatgcacaataaccaacgtactatcaattgtgcctattgtgtagcagacatactgaattgtctgataatatagttgtctaatccggcaaatcctccacgcttccaggtaaggattctgttgccttggccctagccgctatttcctcacggctatacgatatacccgttttgcttccgtccgtccctcttggctgtcccatattccaaccatgccgcctgtttaatgcccccaatattccgaccggatttctctttccgccaatgagcatgtttgacagactttcttcgttttccatgttcaattttttgtatatagcggaaccttttgaacctactctcgtctcctccctgccccaactgttaaccgtatctgtatctataccagtcaatttactaaacccacttatagatacctctttgtcatactcataacatagagttatatatatatcacatatacagtctattaaatccagattataggcattatttaaccttgtatctgtatataacctgtcacgattaacaacaaacaactgtttattaatatatataagagcagcattccatcggctctgcggctccttacgcatatcctttatgtctctattgtcgatgtaatcttggagatacatagatatatcatttgcatagacatctatggtattaccgtccctatctgttattttgaccatgttaatattaatatctgacataactgtacatctcctctctggggctatgtaacccaatatccttatctatccacatgggaatatgtatataatatatatctatcccgccacactgtatttgtattaactataaggcagacccattggagcattgcgtccccctctctgcctggttaaggtaaataaaaaaggccctgacgcttagacagactgctacatccgtctataacgtcaaggccccgtggactggttatacttcgccgcgcatctactggccggcggtctgcatgtgtggtcaaggcatccgagacactagcacacatacacgctatatataattatcaattggttatactctagcagattttataatatctgtcaactgcaaaattattgtattactccatactcataaattgtgtcactgggtaaatctatatcatctgtccaatatacacaagtccggctctggtctaattgtacttgcttaaacaagccataaatatcctttaaatctccatattgcggtattgtctccatatcctctttgacatcatataaaaccgtttttccgtcgtcaaaaactaccgacaagatatagttatctaatggttttacctctttaattcttggcatcatctcaccacctccagacaggagaaaaagccgcctttacaagcggctctaatctaatcccagtttatggcctcatgcggtattgtcggcgatgtatctgcttttgcttctgctatcgcctgtatttcatccagtgtcggctcatcttccggcacaaaccggattaaaaccttataaatcgtttcaatgtctttttccggtatcatgtcaactaaacattttatcgtctctctgctcatatcctacacctcctatagtcttttatatgcctgtcctcttggtcttatatcatttactgttataatatcattttcaaccgtaaataaaacccttaaatctccaacccgcaaacgatattcattttcaagtcctgttagccttttaatgtctccaaatggcaatttttcaatcgcttcttttagccgcttctttgtttggctatctgccgaattaatatatttcacggctttctttttgtactctatccgcattccggcatctcctctcttattgatacctcaatcatacatctttgtgtatcaataatcaagtacatctttgtgtttttatgtactattttttgtactctaagatgtcgcaaggctggcaccctaatttgtcgcataaatacattatagtatcaactgcgacattctcattttttaccaatctattaaccagtgtcggggacaaattaaatatatttcctttcaaatcctgcttttttaatcctcgcctttcaagggttttccacaatccatcatatgatattttaccctcataggtatttttccgctctggcatctcctacaacctcctaacttatatgatttattatacatctttgtgtactaattgtcaaacacaatcatttagtacatctttgtgtattttgtatatttcaacaatacatctttgtgtattttaacaattgcgcaaaagtacatctttgtgtatcatatagacataacaaaacaacagaaaacaccgagaggagatggaaacatgacaatatttgaaaccagatatcaggcgcaaaaagaaagagcgactaatccattttttaacggaacagaaaaagtcatcaaggtttgtggcggatatgctttaatggatgccgcttattacagagtttggaagatgcagaaataacaacgcccacccggaaggtcacgagggcagaaaggaaagaacatgaaagacatagcagtagtagacaaagcaacgggagaacttgattattttgtagtcaaggaaaacgacgttatataccgcgagtacccggacggacacacggagccggccaacgaagaagagacagccataatacaataggcggcactgccgcccctctaatgcgggtatccggtcgcaaccccggaggaagtcgcagagcggaggaaaacacctaaaacaggcgaagaagtaacgccccggacgcgctccgcgccggtcgggaccgtgaacagtaaccgccagaatgagaggagaaaataccatgacaaactattttaacaacgtaaccagtttagaggacttgaagaatcagtttaaggccctggcccgtaagaatcacccggacgcaggcggcaatgtcgagactatgaaggaaatcaactgcgaatatgacgcgcttttcccaatctggaaagaccgccacaacaccgcagagccacagaaccagaccacagaaaccgcagacagcacccgccgcagattctacaccgaatggggatgggaaggaagtcgttacaattccagcatgagcaccaccgatatttccaaagcaatcaaaatctattgcaaagaaaaatatccaacatggaaattttcagttacatcaaaatatttttctggcggttcctctattgatatttccgtcatggaagcacctgaacagattttcgaccttgcagcctgtcgcaaagcatacgctgagcatctggagaacaaaaaaatgggctactatgggggccgcggcctgggaatggacatagaaaagatgctagcggatgacaagatgcattggcaacttcacagtataagagaacgcgacaaggaatattttacagaatacggcttttcggttctttccgatgtttttgcatttatgcagtcttacaattttgatgattctgattcaatgattgattattttcactgcaatttttatgaatcattcgatatcggcaagtggaacaaaggctttaaagtggttcctaaaaccgccagaatcaaaaataagagcaccaaaccggcaaaaaccagggttcccacaccaacgcaggaaaacactacagaaacggaaaatacagtgttaccggacaataaaagcggctacacctataaaatcaccaaaggcgaagacacccgggacggttccgaattgtggcttgtacggattaatgaaacacttgaccgcgccgcatacgctgccgaaaacaaagctatgcaggagcgcggtggatactattctaaattccggaaagcttttattttccgttttgacccgtccgaaattctgactgggaagaaagcagcataacaggcaggctagcgaaccggggagcatcgccccggctgccttttcacaaaaaagagaaagagaggtacatataatgcaaattagagtgacagcaaccgccgcaatagcgaaaaaggtgcataaaaacactggttttgaaagatttattaacaattcactcaaccgccacttttctggcgattggggcgatatttccgaagaggacgccgccgccaatacaagcgatccgctctatgctttaagcgcatacactgcgcctgatggcgttaaaatctggattaagcaggattacgatgttgtaaccgtgctttttccatccgaatactaaccgaaacgctcccaccgctggagcgtccgcagggaaccgccgccctgcgctgatgatggtaggcgagaaagggacaaaatgaatttaaacggacgtttttctacaattgctgaaacagaaaaaagtattgttgttggattaattgagaatatcacgatggaaaatatcgaatacagcgatattttaaaaattgccggattttatggcatatcaaccgcccccgatttattcggttttcattttatcacaccagacggcgcaaaaaaacggggttgtaaattgccagttgcaaattatacgggttttttggaattatttaaataaccgccgcagagaatgccagctggaccaatacagacggcggtttttatatcccggcccccatggagataggggagaaagtacaaaatgagagattgggaagatgcaatattagaccggcaagaatcagaaagcgaagattgccttcaatgctcgtacaaggggattatgtgcagaagtcagtgcatggaaatatgctatattcaaaatccctatctaacggattaccaaaaggagaaaaaaagatgaaacagattgaaaaatggttgactgataacggcattacataccgccctgcgaaatggggcaaccctgattattttaacgatggatttaatgtttccgggctaatagtcacatttgatttttacctcgatccagatgccagccacaaaatgacggcctttgagagctatatgagccgcaaaaaaagtcttgattgcaagtgctatagctatggggcgggattctggtttagggttttaaccgtgtttgacgatgcctgcctagaagagcacgaaaaacgcgtatctgacgcgatagaggcattctggcaggcggagcacgcccgcaggcagcagacacaagcaaccgtataattcaggtcgtcaggattccctcggattcgatttccgggcggctttttacttcctcgcgcccagggagaagggcagaaagaaaagtatgaaacagcaaaactgtattttgaaagtcgtaaaaaatgacgtaacaattaattttgagcgtttctcctgcaaaaaagcacaatctgtcataaaccaatataaaaaagctttccttccttgcaactttaatgattatttttttagggattaccacgctgccgacgttatcaaaatcattgcaactccagacggctaccacgacggcgaaacgctggaagaatatacgcctgaacagttttttgccgccatattttaattaatacagacctggagcaatccgggttttctgtatttccgccgcggttccacgccgtccagcaggtgcaacgcctgcgagcgggttttccccacgtgggagcaagtacttgttacagagctgtacccgtctacactccgcatcaagccggccactgtaaaccctgtatcgccccggtgacgtaatccggcgcttaacggttgcgcgatagcacccagcatgcaggctatacaccaccctatcagccgtgggacgggacacggacgggaggcgtatttcctgctggcaaaatcaataaaatgagaggagccacagccatgagtagccacatacgtagtccgccgctagttctcagtttgccaggtattcagcccgatgccgtagcagatacgaggacttttttcgcgttaacaagctcatatttagcccatattcagatttcaagttcggttcgataattataatagttacaacgtctaaatccgtttacgttcgttctggtgcgccatagccatattttattgcttgcgctctacttatgtccgtgatatgctataggcattacatgggcttccagggcttccagggcttccagggcttccagggcttccagggcttccagcaaaattgtacttattttactaatttttcgcaaggattttttggtaatattttgtcttttgccatagccataaaatacgaaaattataatatttttgttcccataatatttctatcaaatcatttaccccgggggtattaattttctttaccttacgctcagattttcaacttatccaacataacgggcatgagcttgccgtaccgtttctttgctaatttttgcatagcacttaagtgttgtatcaactttttcatgaccaagcacttcctttaccatctcaattggagcacccttattaatcatatctgttcctactgtacgcctgaaaacatgaggtgtaattctaacaccgtctaaatccgcatcacgttcttttatttgattaagaatatttcgtactgtctggtcccctatgcggctttgaggcctatgtggtgatacaaacaacgctgggttatcatcattacggctgtcgagatatctccaaagatgcaatgccacttgtccatttaaacatacttgcctttcttttcttccctttccataaaccacagcagttttacgatgaaagtccacatctgtaatatccattccacatagctcagatacccttatacctgttacatataacatatcacataatgccaactcaaattcattttcacaagcacatcttaccatttcacgttgttctggttgcaatgtcgaacctattttatattccacccgtgtttcttttaatttcttagctggattatttggtaacaggtcctctgtatacagaaaagagaagaaactacgaatagatataagtttactattatatgtcctgtctttccatttacgaacaagctttccatatgcaaggtatccctttaaatcttgatatgtaatttcctttacatttttatttatatgtgccatcatattttttaaattacatttatagttgttaatactaccatctgtgcacccatctaacttcatctggagcaaataggcattaaggtattccactgacatatctatttcattagataacgctgtttcttctgtaaaaaactgaaatccagataaacacatgttgagtatctgttttacttgattaagtcgttcctgttcttcgatgatatctacaatattatccatcacacgcctgacaacatcatccatacttacctgttctgccatatatttccacccatcctttccttgtatttccgtgcaggataggttatgattatcctatccaaagagaagaagcccttcagccgccaagcacacggggtttcttttttcgtacatatgttcttttataatgttttttattgccggggtactcccccggcttattacatttcaatctcaatatcacattcatctttcaacaccgaacggatatcatccagtgtgtacaaccccttatcaaactgcctataaaactcgatacagtaatctacgaaccgttgttcccggctctttccgtccacttccctacgtatcagttgaccaaaatggtccttaaacatcaatactggaatacccaacatcatgagaaaagcagtctctgccgcgtcatgggtagcctcttgtttaatttcccgcaattggtctctggatagattatatgtaggctgttttctgttctctcgctctacgcggcgcctttctgctcgtgtcataatatctcctcactccttcgacaaatcatgtgtctttatcatccatacagtatcaatttttttctctataaatacgttctatttcttccaataagacatgtattaatagattcttgatgaattgactttctccgaattccttccctaagtcttttattccatctataagaccatcccagtatttatcagaatcatcgggttcactatactgcttaaacagtttccatgtatatgtaaatgccctctggtaatccttttccaacaatggatcaccacctgccctgactctctttatttcttgccaaacggctaggcaaaacagccgtctcatgactccaatgtcatgcttccatagcatttcttctatatgtttcttcgtaacctttttacagtttttcattagcatccatgcgtctgtgtaggcttgccagtacctcttaagttgttcttcgctcatactccaccgcccttaccgtgcacaaacaactaaaacacttatcatcaccaaactttccatcatagtgactacatgtggaacatgactttttattagcctccataataatttttcttaaccacatatgtaattcataagtcactttttcaccttcttttaacctatttttattagttcgtattattaaagcctcattctttctatcactgctttatatcatcctttcaaaaattcttgctaaatagctcaagctgcttcactggttcaaaattcatccacaatacttctcgtttcttactacacacctgggaataacaaattgtttcttccctataccatccctgcaggcggtcgttgtacaatttattatcataaccgcttagaaggaccggccccttatgtgccagaagcgtgtcaagcaaatcgttctgattcttgtcgtccatctcgaaccgatattgtttcccatgtctggtacctaaaacgtaaggagggtccgcataaattaatacattcggatagttaaatcttggtataagttccacagctggccgattttctatctgtactccacgaagtcgttcggccgcctgcataatctttttcggcaaattgcaccaatcctgcgaagcgtacgaacgctctcgcccttggacatcattcttccatccaactttttcaccgttcgtccgaaatccatgccccatgttcagacgtatgtaaaaatttacagctctgtcaaagctatctgctggcaccgttgcaaatgcgtcatcatataccttcctagcatatggtgtaaaatatatctctctggccagacgttctgggtctttgcgcatccattcaaataagttaactatattactgtctaaatcattcacagtttcaatatggctgcggggtttattaaataaaacagctccgctccccaaaaatggctccagataactgtggtgtggcggaaagaaactaataatccagtttgatatactccacttactgcctggatatttcattactgctttcatcttcgctcctttgtaaagacctaatagtgcatatgtcagttttacagattaatcatcatcgctaagccaatcccaaaactcacactcgtctgctggataaatattatcagtgctttcgatcccatcggcgtgtacattttcacatccaaaaatgttagacaaagcacatgctaaaccatctgaatctacacaatcgccaatttggtcaagcgcatcctccacctgttccggattctcacattctatttcaaacgttacatctgcatagagcttttctcttacctggaacttaactttcatcttatctcccttcctccggtattcccggaaaatatcaatttactggttcccaataccagtcaacccgttgcatgacaatttctttaatatcctcttctatttcttcgtctgtcgccccgtccggatattccagctcatcctctacatcagtaccagcgtatccataattagctttatattttacttttctcatttttcatctccgtcaaaatcttaattttatttctttttaattacaacgcccattgccctctctaacccgttctcgccaagccacaagtcaaactctgcattgacttgtgattccaggtcctgcattttcttctcaactgccttgcgagcctttcgagaaaggtcatcggagatgaaagcaacacccaaccagttataatccattatgccgttcatcctggctcctttcgaaaatgttaattttcccaatcaagcgcttgtccgcactctgggcaaaacttgaatatttctccactatctctgtctaatccttcattacactccggacaacgattataataatcttcgcagcttccacagtcctctttttcgcagtcctcacattttttagttcttacctttgttggaatctgttttctaagcgctaagattgccgttgcaaaggccgatttataaatatcgtcctctccggatgtacagtctgctatgcactccttaagtcttattattgcttcttctttgtaattcacttaatattcatctcctttctgcgaaaaatgttaattctggtgtgtaaacagccaccataataccaccagatacaatgcccaaaccacattatcgcacttcctatcccattgtagttcttggtactgcatccactccatgccgtaccagaccgcggatattgccatgcttaccaccaatgccttaattagtgacaattccattcctccttcaaataacgatatagtggatgtgcgccagaccggaacccctggccgtatggtcctccattatctctccataggcacatccgctgctggtcttactggttgtgcatacatcagagccatgccagctatctttacgcagtcacggtcctgcgaatcaggtaccggtatgcgctgctgtgttataagctacgattttgctaacttacaaatgctttgtattcctcataatctaccagcacggtatcatattcatcccattttcgcaccaaatccatggtcatttttacaggcttgtcacactttataacaccatgtccataatgcttctggaaatcctcaagactatataattcgcacttgtcataatctatggtgcctaaatatccagtaaaacaacgctcctgctcatccttggtcctttcccatccccataaagtgaatcgggttccggcagagtgcttgatacttacggctaaatattttctatccttcattcctctgcctccatgcgccactcaatatcccatttgattctctgcccacagtgtccacaatatggataatttgaattaaccccttcaccacaagatgggcacaatccgatattctctttgtctttaataaaacatctttcatcctctggtttttttgctatctgtttctgtagagctgatatgacagcctcaacatttttcaatggtatatgtctaaatgacttaacctcttggcatcccatcaattttgcatttttaactaccattgataggtctttcgcgattccttcttcaatcatctctcttcctcctgatgcatttcgtcatattggtactgtaaacggcattctttacaggttccgtaaggttctccatctccacccatggttcttaatccggcacataagccttcttccatccctggatattcaaatttggtcatatagcaatgagcaatcgcatcttcaatccttttttcatctgcctttatctttttgtattcccaatccaaaagcatgagcaaatccgctcttgttgtcgcattatgagtttccagacttaactcccgctctattaaacccatctttttttcgtacggcagccattcaaatctttctttgtcatacttcattccttctcctccttatatggttccggtaatggcatccaggccagcacgtccagtttttcccacccatcagtaaatgttgctccgttccaaaatgccctaatcacacagtctgtatttttgacagatactaaatatatctccaatggcttgttatcatatagcggattttctttcggtttttccggcagccgctcttttatgggaatccacttatgtatcatcccttctatttccttcggattcacacccgtattctcaaagtccataagtgtttcccttaggtctgccattgcccacataaggcggtataccaatgcggtgcgcccatttgggtcattgataccatattgcaggttgtccatgaggatatcatccaatgttttattgtcatccggcagttcgattccctctgcctcgctgaatttgcggatgaagtcccgcaaatccatgtctgaatcataatctctgtaccatgcccacctgtcctttgcatacatgcaattatgtgccagctctaccatgttcatttcgctggcaggcttttctactgtcaatcttttcattcctctgcctccttcattgttacgaatcaagccatttccacattatgattccaaaaacaatcaacattacgatataaacagtcgcatctgtttctaccatttacttaacctccgctaaatgcatgccaaatgagtcaattgccttcatagcctctcccaggctatcaaacaccataccgtcatacaatatatcatcaatccggtaccccagttcatcgccatcggatggggttgctaccctcaaggtgcagatatccatgcctttgtattccattacctttgcgtatctatcattcaaatgtttcattgcatttactcctctaaatacgtgtttaatcaaacggtatttccccttgtactgcaataaatccagtatcagtcttattccatccatatattttcgtttcggatgaatagttcttcagacgtttggtttctggctcataataaagtgggataaagtaatccatcatgccgccatcacggtccttagcaatctcaattacgtttgttgcctggtaaatcgggttatcatctttccaaccaaacatttgcttactaaggcgtttgaaatcctgattaactctatgcacaataaatgcattatctacagcatttcctaaatctgctgtaccagaaatatcgtccaaccgcaaaaatcccatagccttgcgagggtgtgccacaaacaaaatatgtacattataaggcttagcaatctcaccttgcagtgtcaaaataaatttggtttgtgcctcatatttgttttctgacataccggaaatatcgaaggtcataaggttatctaaaatcaacatatccaacttgtcagcctctattttacgtttaaattgttcttccaccgcttgaaaatcaaatccgtattcgttgttgtataaccagaattttctatccagccattccgcaatctgctcctgatattttctctgtacattgtaataaccttcgaattgagtaggctctgtgtagccttttccggcagcctgtagattcatccatctcataaaattctttggggccaattcccctgaaaaaactccaatattgtttccagcctcaacgccgtccagaaccatctcggaaataacagaacttttaccagctgctctcaaccctgacataacagaaacatatcccttttttagtcccctcatttttttgtcaacatctgcaattccagtttttataaaacgttcatctggcaccggcaggtttagaatatccgtagccgtataaaatatcggttttccatctaccggttgaataacctttacttgggattgaactggttgccttgaataaattttccgctcatattcctgttgcctcttttcgtatgcatcaggttcatacaatattctcacatcccgccaggttttatcctggcaggaattatgaaagcaatgaaatccgattgcccctgaccgcgcctggaaaatacaggcgtcttttcctttgtggttgctgtcaaacgggcattgttccaaaatatacttggttccgtccgaataactggtcttttgataccgcaatccatattttatcagccattcctccaagtcgaattctctggggctgtaatcattgtatttctgtggcttctctggtacaggaagcatagccgctaatttttccagatatgctttatctgttggttctttacttccctcagtcagcaagtgactcatacggtgcggattctccgatgtattacttcctttccgcgccattgttccatataatttgcagattcttgccgggttaaaattggacttgtcgatggatacagtctcattgctaaaaaacatgtccaacaccataagacaactctttaccaaagttttattttcctctgaatttgcaagctgaatcctatataacaaatgtattccatttccactcatagctgtgactggtgagttaaaaccaatattcttcataaacgcataaactctatttccagtttcctttgccttttgtagctgttcatccgaactagatacacctgaaggacgtttggggtctacgtctacaaaaagccaatcataaccaacaatatcattatcgcttgtctgaacttttgtatttgttacaaaccgatttctttgctctctggaatagcaatctggcttaatgtcgttcaaaaccatgtatatattgctatccgatgaattcagatggcaaagttgttccagcatagtatctgcattacgaaaatagccactgcttaccctctttccatttgcttccaggcaacgaacctcaaacaactcaccatcattttttaaggcatgtattgtttttcggatttcgtctaactcaaatattttctgtcctactgccatttcttagactcctctactgccagcccatccacttgctcattatgtatatttccattatgcccttttacccaaattggagaaatatccgcaaactgcttataaagcgcaagtatctcattccacaattcaacattctttcccacccgatatgtcccttttaaggtctcgattacatatttgctatcagaataaaggactaccggcaaacttcggtcagtaatacatttcaaggcattcagaactgccaacatctccatctgattatttgttttcccgcgacacccaccactctttaagcgatatttgccattgtagattaacttagccgcccaaccacagccagaatcaggtgaaccattattaagagctgaaccatccgtataaatgatgattttgtctgttttatccatcattgccacctctttgcattccctgccttatattcctgctgagcaatttttttcgccaaatccctaatctcagaaattgcgggtggaaacttactgtctttgacccattgtgatactgcattttttacccatttggattccaaatcgcataaggattcaaaccaaacatttacctcgttaatatccttcaacatatcgcttctagcataggctccgcgtatgatggaaataacatccataaactctgtcttactcattcaaccatccctccaaactcccagatttattcttgtcatcatattgaccttcaagcacttttggaaaattattaggcctggcaaaccattcaaaatcaatcatccaaccacgattgcctcctcctttcaaaaatgtgctgctatttattttttgtatcgctttgagaacatcatcaataccgtactcttttattctggcagaaatcattttgtatcgagtggatgtagatgtcattctacttatgggatttactcccaactggttccaggcttcaaccacacgttggacatctgtccgacatatagtgtcgtcagacactataatatctttatctatacctatcctatccttacctaacctaacctgcgtctccctggtaagcaaaatggtgtcatttgtgtcgcaagtggtgcgcttttggttgtcatttggtataccaatggatgtcgtttggttgccttctggtaagtcattatcactttttattaactgatacgcgccattttctttaatagaaagcatatctttttcctcaatatattgtgtcggtttgtatctgtcactccgaatgtaattatgaataagccaatgttttattacacacacaccttcatcgaactggatgataaaacgtttcataagcagcatgtcataatcattttggtttgctccaacattccgcattattttctttgcgttattcaaaaatccatcatcatctgcccttaataacaaatgaaaatataatgcctgtgaagatagtggcatttcagtaaatgcatcactatcaatgattttttttgacatcatacgtctttccgccataattaacctctgcctttccataatttggacacttaaatggcttgtccttgaaatctgtcctcaaaattttctttttagccaggcagactggcttttgttgctttgccgtaggggaatctacccaaataatattggtgcaatgttcgcagtcagccttgaaccgcttataatgtaaaatttctcgaacatagtagtaaaatgtatcaaggtcgtaaaaatcgcttccatcatcaatcatgttaaatacttccttgatagaacagccatcctccagattcttaacaataaattcccgcttttcttcgaacatgctattgcgcttttgatgcccagacatttacatcacccccaacaattcaagaattcttttacctgattcttctggtctacaaaacagaaactttactccatatttgttttgcattgttgaacaggacttagcaagccattcaccggttgccgcatctggaaaacattgcactaatttatatttgggtttaccatttttccaactcccaataatttctttagattttttccacatatccagcctcggattgtgccatatggttaggtcctcaagtgactggaccccttctttattttcgaccagaatgtagagctgtatttcactgttttgcgccctctttaatcctcggtggaagaatccatgcctcttaacgtaaagcgtctgaaaatcgcttgtagtgcgttcagcaatatgattttcaaaacatatagtatcaatctctttctcggcaaatctattttcatcatcatcacaaatagcatgataaagacgctctgccaaatcaaaagaaactccttgcatttcgcaaatatcgtatacttttttatgtatttcccttttagacattttcttaaactggatatcaccaattaactcggcgatatcctttttagtgtccacacaaacactttgatttgacggtaacgtataatcgccacaatacaaagctgtacggttccagtaaatccctactgaccggaaatactcatgcttatttttatgcttgttttcttgctgacgagtatcttccaatataagcatttctatccccctttcgataatgggtagcaaactatcaattaaatggcaaaccctcgtcctctaccccatctggtatattcatgaatccgtcgcctacaggacttgttgaaactggtctattctgtggttgatttccaccgttagaagttcctttgctatccgcaaactcctggtcatccaggatgacctctgttgcatataccttctgaccatctttatttacatagctacctgtttggattctgcccgacaccaacacccgtattccctggtggaaatacttctcggcaaactcagcagcacggtcaaatgcaacacagttgataaagtctgctgttggctgctcagcggaactgtcctgactcctgcggcccctcctgtccactgcaagggtgtacctggctatagccatggaacgctctccctgtgaatatctgatttcagggtctcttgttagtcttcccataagtatcactttattcatatccttttctctctttctccggctgccccgaaagacagccggcaaacttaaacttaggaaattacaatgaactgctgaagatgtacaagttcaaactgtaaatattctttaatagatttcatggcgacattcttccatgcaccaccgtcagcctcgaagatagcacactcaatacctctcccatcggcctgcctcatacggaatacgaacgcgctctctggctgtgttacttctacgaatgtcctgaatggacgcagtttaaccggatttggaacaatagcatctcccacacttgtaattcctgtttttaccgtagctttctgcgtcactccatcatcgccatattctgcgatagattcatcttttaccgtaccggcaaacttcaatagcaacgcgcggtcatcgttgtcaatgaatttagactgtaaggctatgatgaaacgttcgtttcccatgtagcgcccatactcaaaatccggaatcatggcctctacctccaccaattcttcacgtttccggtctgcatccagcatcgagagcactcttactttcgtaggagaaacgacctgcaccaacattttttctgccatcttgtcaacgcctgctttcagataatctaccagactggtaagcgtgttcatctgaatggcagaagctctcagttcattgtctactctatatacgtccttatcgacatacctttcgccattgatatccagaacttctgcggtttttaaaccaacaacatactgtaaagcgtctcttgtcatatccatttttcatatcctccttatgcctgtttagctactctcatatccaaaacctttaccggagactctttaatttctcctgtttccgggtctacaacttttccatccactacaagttccgccggattctgtgcgcttggcttaaattccatctgtccacgcatagtatttccatactcctgtgcgtacacttctccggtttttaaatcttttccgattgccattcttgtgaccatcggttttactggagccagctttgttataacggaaatatccaccgccgcgtcatccctatcctcattctgctcaaatttaagtttgattgtgatttctcgtttgtttttgtatggagtgttgggattctgcatattctccacaacttcctccatcgcttttgcaaatacttcctgcagcccaccgcctaccagttcttccagatttacttttgccatgatattttcctccataggtaatatgtttacgggttacatttatttaataggcctattaaaatcacatcatagttttaaatgggattgcgcccatgtattaatcactttccggcagaatttccacaccggttacacgttttaagaacaaacgcccatcatcagaaacgtggtaccaatgctctccgcttttcgttgctaatccgattgaaacaagctgttcccaatcctctgaatctcttgggcctgcgtcaaaatagtttcggtatggctcatatctccgatgctttgttccacgcaccttttggttatcaaaaccaatggcgtgcttcatatcatcaatctgcttgtatgtaaccttttcataaactgaactgtttaccatgccctactccttttccaaatcatagaagaccagttcctcgccctccggtagcggacacgcatcatctttccatttcaatgattttacgcttgtccaatggtctagggggttgtaatcatcgcttccaataatccgtaatacttcaacggtatagcaacggctgtcaatcagcaacctgtcggaacgcttatgcgtccgattgtccagattatccaagatgtacttactcagctttcttgcattccttaaatcggtctgcaacggcttgtaatgcaacgtgtaggtaattccgtcaacttcctttaaaactgctctatctgcccatcttgctgttttaatacaggatgtataaagccaaatcttaccctcatatccgttcgcccggaggcgatgaatcatttccaaaactctcggcgcaagtaacatcggctctcctccggtgattaccaactcctcgtatttcagcaaatcttcaaacttgacctccggcacatttccgatatgctcattacagcagttttcgcaatgcctggggcatttatatgtaacaattactcttgcgactttcttcataattcctccaaagtttttatagtgttttctatcctgcaaacctctttcaaatgacggtcactctccattttgaagagttccctttgcttctcaatcagaagctcaacagctttctttttgtcatcctccaaaagatatacagtatcgttaaatccagtcactgcaccgatttctctttttgatatacgactgttccatactcctaaaagggtataagattttgttttttcttctgcctcatactccgttcgttcaaactgtccagaccatgaacgatattgaaatttatatattttcatatcgccctccaatcagtgaatcaagcacctgcactctgctctgcaccttatccggcttcgcagaaccgctcccaacagacttgttgtaaatctcgttcacgctggtctggctggaatcgaaaaacttataaagaatctctttcagttcttctacagacattccggcatgcagggctttcagcgccacataggtgcaagacaccagatggcttctggttttaattttctttaaaactctcttatcagctttctcatctggattcagcaggtcacatacggctttgatgtaatcaagtgcttgtcccatttcctgtacctgttcttctgtaaccaccgccgattcgataaacggacggaagctttttgtcatgaagtcccggcaatccgaaaagcataatgtccatgcctgcatagctacattctcatcattgtaatggcgcttcccagcctccgtaattgcttcggcaatcatttcatgcttggcaatttcctggaatttcagaatgcttttcgctttaactcttgtcagttctacactggtaagaggctttccgttattaatacggaagaacagttctgcaatctcttcctcagtaatgccctcaaagtaatagattgtcagtgaataatcctttatattgtcctgcgcccactctggaagttctgaaaacttcaaccctgaaacagttacaggaaaaccattttcatctattacttgcggagtatcatctgataaaggaaactctccatccagatatcccttaatagaaagtgacctctgctgaccatctaaagcgtcatacttaccatcatctttccgtgcaaagtagaatggtggaatcggatatccctctatcattgagtgaatcagcaaggattttctggacatatcccaaaccggatttctctgaactgcacagtcaaaagaaacctgtcctttctcaatctggttccgcagcgttttaccactccactgaatgtttgcttttttcagcatttcttgtttcctccttaaaatagctctttccttaactccgcttccaatccagcctctgcacagaacactttaacgcggcttccagccactttttcgacctcagccaacatttgcttggggtctgcattaaaatggcttaaatggcataatatgacgttacgcaaacacggtgtatggtttttacgaacaacatcaagtaccgttgataaactgctgtgtccacgcataacgtgtttatagttcgcatccgtgttctccacatcgtccatatggttacactcaatcagcatatggtttaatcgtttcttccggaatgtccacggaagatattcaaaatctgtagcaaacagcagttttcccatttcctcatgtttaaccaaatatccataatttggagtatcattgtgcggcacataaaacggtgttaccttgaattctcccaccttgaacattttcttttccgggattccgtacaaccacccactagacacacagtcaattaatctctgcgtttcatcgttagtataaattttgattccagcagaaagaaagtcttttgcgtatttgagatggtcctggtgcccgtgacttaccaggcacccaaccactttcccaatctggaagtcgatagtcttcttcacatccaataatcggcaaccagcttccagaagaagaatttcattctcagcaatcagcgcataggcatttcccttacttccgcttccaataacttttagtttcatcccattgtacccactgctttcacaccaaccataatatctggtggaattggcaactttccagaaaactgctcaatcggcttccagaggtgcaggcagtttttcatattgtttacatagttcgtcttcgctggatgatactggataactgtttcgtcctcattccagaacacatctttcagcaaacacatttcattccaatctggcgttctattcttggggcagatacttacatgttcccatccaccgccataactccagattacagttgcgcctttaagtgttccttttgtaaaaaccccacatccaccatcaaaacctaaatgtgtaatttggatatcatgtgctcctaaacacttctgcaaatctctcgctttcttcattcctccacctcaatttcatcatctgttggaaactggaatatccgtggaagcatatgtacatcaatgtctccagcattagcaggcttaacaactactcccgcggtagagtttatcagtgctttcatgctttcttcatcgaatttggcattcatgtcaattaccaaacttggcataattccagtatattccttatgaagcatcttcatggctttctctgccttttcaggcatttcatactgcgccatcaacgtcccttttccagtatcaccgaccatgttcatgtgaatcattccgccagctaagtgaaaagccgtcatttcataaggaacatcaatagcaccattctgcgatattaccctcatacctcgacctcctcgtccgtaggcatctcgaatattccgaacttctggtctgccacgtattcatcaaacaagtctctcgcaactttaaatataggactttgtatcaacaaattcatgttgtaacaatcaagaatccaatccagaaccttttgtgcctttgtttccgatgaatatgttcccaaatcggcccaggcacgttcgattgggtacgttgccacaatatggttatcttcatcgcaattcacagaaacgcaattatccagattgattatctgctttccattctggcttttaatcagcaccaaagaacacctccctcattgagaacacccgtctgcccttttttagccgttctcggttttcttttgctctctgctcgctgtcacaaataaattgacgacagatttccggcctaacttcataaatcgtgcagattttcttcccattatcccggaatgggcaggtcatatccaataccggcttcgccaccgggataaggtgtttgctttcctttatccctttctggcgaatgtacttgtgaatcctacggatttcatcatctgacagagggagaatatctgaacaacaatttccgcacttggagcattttccatcaaccgtgtaattgtagaggttatcttcgatacctttcgcaattgccgctaatgccgacatacactccatggactatccctccatccagcttttatccactacaggagctgtttttttctgcttctggcttgctatcacatctgccatagtcttaggcggttccttctgcccaatggaggacggctgttctggctccataggaaactcctgggcattagcattgtaagtgatttcctcctgaacctgctgatacacaacatcgtcaagctgcctgtattcctgtgccgctactggatttccaaagtctttcggaatctttttcatgacgttgttacgcatttttcggataatcatactttctctagactgtggttctgtccatgctggagaaagataaggctgcaattccgggcaatccaaaatcttatccaaatcattcagttcctttgctttgtccatgatttcctttttcttttcggaaatctgttttttttgtgcaggtgtggcatcataccgattttcacaaactccaaaggtttcattcatcagattgtttgaaagatgtgcatataagtttttcagtacatcatcacgttccccaaaatgaaactcggtatgaccatcggcatattcaatagggtaaaccaccctcacaacttcgcctttcccagttggctcccattctggcggctctacttcgataccttttctttttccataagaaaaactatcgccagaccggacaagccaatatgggtgcaccatcttaacccccctgccaaatttagcagttaaagcatcattcccatcaccttcaaggcccatttcaatttgtttttcccaaactgccttctgacctttttttgctgtatttacactgcgtacctgaaagtagcactctctgggaactgcattagtattgagtttaagtgcggcaacggtcaacaacgtgctctgcaaatttgccgggttgatatcattgggagtaagtccctgattatgtatcaaactgtaaatacaccccattgccgcaattacacactgtttggaatattcgtcaaaggtcacgccacgttcctccagcatttgccgcgtagattctacacaggcatttgtaaccgttgcaatctcactcctaaatgcaactgtagctggcttaaccggtggctgtactgtagttgaatcctgtttattctctgtctgctttactaccatgattatctatccccttccctattcttcaaacaatacgcccatatcggccaggatttcataaaatttattttcaagggttgctctattttgcattccaacctgctcgtcctcttcatctgtggatttgggttctacacagaacccttttttcttcaagcagtccggacaaatatcaacggtgattccgttatacccaacgcccttcatccttataccgtctgacttaattgttattttcgccaaatcatctttgctcttactctgcttgcaaatatcacaagtaaataccgttgtttgtgccataactatctgtcccctttctgccccattcggaacatctgcttaaaagtgtccaaccagttgccctcattatatgccatcttattgtaatgatggctgttagccaactgcgctgaagcgactgccacgctccccataaccttccgattctgctgataactccggtgacttctctgtttatgctttaatgctgttgccatgattacttgtcctccttcttttccatcaaatatgtagcttccatatcagcttcatgaagggccaataccagcggatacttctccatagccaatcccaaggtattccagttctctttcggttcgtaggcccccatgtgccatcggattgcataccgctcaaccggcagcaactttatgtattcttcaatcatcatgactgacttctcgccatgtccgtaaggaatcctatcatcaaccgtatagaaaggaacctgcacccatgcaccagattcattcttcttgttacgcatttcggtggtgtagtaataggttttgcacaggtcatgaagaagagaaacaatcactatgctatcattactgattttgtccgtgttcagcagtcctttccaaatgttgtgttcagagccagaagtctttttgtccaagcaatcatagacattcaagctatgctccagaagtccaccttcgaaagccccatgaaacctcgtacttgccggagccgtataaaaatcactcttgcggataaattccatcagtttatccattccttcacgatttaccgataaaagcagtttttcaaaccgttccttcattcttatcctcgctttcttccaccagaccaacaatggatttcactttatcagcaaacgccgcaacttcttcctccggcacatcgacttcggtcacgataccctttgcagaactgttaatctgcaccttgtcgccaaccttgaccagaacatcggaacgatatgtatatgccctaccagatggcttgtctcccttcaaaaactgcactttaatcaacattgctaaactccttccacattttctttatatacttccactgccttttcaagaatttctcaatctctggcatatctgaatccttgatgtttcttacctgtacaggactaaaaattcccttacgttgtaataagaagaataaccataaatcttttgcaccactgtcttcgttctgcgtaatatcgaatctaacacagtaattaaggtcggaatcaattcctaatgaatcatctcctattcccagccattcttccttgaaatctgaccagctatcatattcgcttcttccaaaattatcggaaccgccaacgtagtagttgcttttactgcaatagtatgggtgattcgtaacgttcagcttcataagttaattctccttatgttttcttctgcaccaaccgtaatcatctgtctgggttgaaaaatccaccaatattattctaggttcctctttcatacaggcgaaatccccctcgcaaatatatacgcactcgtcacagtcctcacattttttcattactatgctcctttataatctttattggatgtcccaacgccttttcaatttttgaaatggtcatttcacatggttcttgaggctttgactttttcataaaatccgcaactttttctaaagcatcaatatcttctggtgtcaacctcttggccgcctcaatgaaaatcttaatggcatgtaacatttcaataacccggtattcgctctccaaatctctcataacttctccctcgcatctaatttgctaatctgtttttctgcatcgacagcaatcaatatagctgtatttgctttgatatcagaaaacccatattcttcaataagaatttttctaacagaccagattaacgttgatagtgtaaagagaagtgttaagggagtctctttatcttctatgtcattccttttcaattctgaaatcctcgtcattggaaaccgacagcataatcatctgggtatcaatctccggcatattgccctccgataccttttcagcgttgtctacgattactggggcgctgactccgataattccagatagaacattgatgatttccagtcctataatcagtttctctgcgccgctggtcgtgttatctccatagggggaaccgttctttgtataaacatcacatacacgctctacgccaccattcttctgctggcggaataactggaaccgtacattttcaaagtgcttgtttacctcttcggtcaaataattgtccttggctgtttgaaactcttcgcacatcatcaaaatccgctcctggtcggcaatcagctgaactttatccttaaactgcttttccagttctgccacacggtctttggcttcatcggacttgttcacagcggcaaacttctggtttacctcggcaagctgtgtctcccattcagctttttcgtctctcaactgtgtacggtaatcagcgccggtattcatgttccgcagggcttcctcttttgcctggatttccatacacagggcttcatattcctggttatctgataaatccacctgttctggaagtgcctctagttcttccattgcctttgtcttatccgcatttgcagtcatcttgtctgctttcgctgaatccaaggatttttcagcagtctttaaatcctcttttgcattgttgattttctcaacgcaggccctgccctcttggcatattttgtccagcgaagcattctggtccgcttcaaattttgccttatcagcctcgtacttctcccagagttgctttttatccacttcaaaggattcaattttctttcgtttcaattcttctggtaaagcctgcccgcaggttgggcaaatcagtgcatcggaagataatggttccggttccacatattctgggaatgactttgcctcttcaatctcgacctgttgtgaaagctttgcccgaaggattttgttgctctcaacaatacgacttaggcgttcaatttccatctctgccgtcgtctgcttctgcatggccccccgaaaatcatcatcagccttatcaattcgcttttgaatttctcgtttctgcttaaccagaccttcattagatacccgaacaatctccgactgcttcatctttaaatcaatgatgtttttagatttttcatcataatcagtaattgccgccgtagaatcctcgattttctggtcaatctcggcaatcttctcgttgattacattccgctgtagttccatatcagaaacatcaatatcaacgatatccttgcttctctcgttgataaatgccgaaatctggtcacgctctttggtcatatccgaaatggagcgcttggaagtggcctttacttcttccagagtctttccatcctggataaatttcaaaagctcatcgaagccgccaacttccatcagaatctgttcctcggtcacattggcaatcagggaaagaatcaagtccaatttctcctgcttcgataaccggaaaaatgcggtcgggtccgtaatcaacatgaagttcttttctgatacaatatcggcaatccggcgtttgaactctgtttcggatatttccacattgttccatgcataaatgttcttatctccctcgtggacttctgttgttgttccgcgcttccgtacccagttctgccgctgagtctttctaagaacgacttcaacgccgtctaccagaagcaccaactccgccaccacatccacatggtcgacatcaacgccccgggaatcataaggcctgggacgaaattcttttccctcgctcttccctgtgctagactttccaaacaaaacccagaatattccatccgccatgctagactttcctgtccgattcatagcaaaaatctgtgtttttttctcaccgaactctacagtccaatttaattttttaaaattttcaaagctggccgaaaccagtttaatcactttcatcttgcaatctcctttaaaatcccttatactaagggtgtttagtttattttgttattggacttctccgcggttgccgccgctggggtccatatttttgtccagacttatgccctctcttttttccagcttctctatcttttggaacgccgcgtcaatcgctctctggtaatcctcttccaggtatgcagggatactcactgcctgctcgtccaacagctccatcataatccggatctttcgttctcttgtcatctcgcttcacctcccattaaagtctcacgcccatggccagcgccatgaccactgttgctacaaccaccattccgaacatccaaaaagttgctatgataatccatctcgctgccgtcattaggggatgctcgtccttttcgtcatcacatctcaatttcatacaccgtccctctgtcgtacactacacggattttgtcaccattaatgtccgtcactatggcctcatgtgcgttaactgtttccatgtggccatccaggcctggataaaccgtttccagatactgatggatacggtgctccgcaaatgtcttagctttcattggcttgtccctcctttccatgcttgtccatcagggccgcctttaggcggtgtcctcctgcttttgaattctttcatcacggaactgttccaagaacctgtagaacatttccgtattctcgtttctttctaccttaatgtcctccgggttcgtatagactttcccgtcataggttgttatgattacgtttgccatatcaccacccctctctggttgattgtatgctgttacggttgtacttcttgtgttgtccgccttgtctttttccagtgaagaaaatattattatggaattaacaaaagaaaatttaacttttgctctatcacttattggcacgcttggtactatttctggctggtgttactattggataacctctcacaaaaatacacatccctctcacatcctcctattcacttgccaatattccgaaattaactcgtctttctatccttaatgtcagtaccactcttggtcacactaggaattaagccacacatcaggccaaacaccttattttgaccagcttcatccagcatgggagccataataaggatattttttaatgtgtcatccgttaattggatagagttgatgtcctgcatagtttctcacctcgctttcttgttttttcttctcccttatcctatactgtaattaccagactgccatctggaatactttagaaaggagttaccaaaaactatgattgaagaaatcatttcttctggcttttgcccaaagcaaaacaaagaatatagcgtacttgtacgttatgatggtaatgtgagaattctttgtgaatgcaaatacgcaggttttaacgaatgcgaccagtctccgtgtcctctcttggcaaagtttccagaaaatcgttaattacagttgggagtgctgtctgaattggcactctctttgtgtttataccgaatatccagttcctgtccatttatactcagatagcgaatataatttgcgtcaaatgtaatatccaaagcatttaaatccagtttcaacacaggcaatccatctgctgtatgagttaattcatatgctctaaccccttttaactcatgtccattgatagtaattgttgcatggcaaccatttgctcttatctcaatatgtgatgagcaatctgaaaaatctgtcatattaggtatcatcttctttcacctcgtttttcttattttgtactacgagacaattatatgtctcttacagacttttgtcaagaacttttttgttgacaacgagacttttttttgatatgattaaatcaacgaaaagaggtgaaaattttggaagaaataaaagatagaataaaaaaattgcgcagacaacttgatatgacacaggatgatttttctaaaaaattaggtctcgcaagaaatagcattgcaagttatgaaacaggacgcagagaaccaactaatgcaatagtagtgtccatctgccgtgaatttggtataaatgaaatttggcttcgtacaggcgagggcggagacgataatatgtttaccaaagtttcagatgatgaccgcttttctttgaatttaggaaaactgagcacaactgaaaatgaatttataagaaatggcataaacttattagcagaaacggacccagagaaattgaaaattttagaaaatttcatgaaagcatggctaggaataaaatgacaaaggcacctcaacgggtgcctccttgtagggcaaggataaaaaggtaaattcttctaagtaaggcattgttatcaatttccttagccttttcagcaatagcattccagtattcttgattactcatatgtatgtaccatcctttcccatagtcatattattgactatcttatacaataagtacgcagtaattttcttttttatctgctgtttccacatttgtccggtataacggacaaatattgacaagtgtctattatgtacccccgtttagggggttatgcggattgaaaacaggtcggctggtgtaacacccaatgcaagggaaaggaggcatatggtgtgtatcgtgggattggccttgccatcttcaatttgattaatttgggttttactcaccccagatagttccgcaagaccacggtctgtaagacccgctttggcccggaactggtacaggtgatactcaattctaaatttaggaaccattttgtgtatacctccatacggacagtatccgcagtagcagtgaatgatatacacaaacttatgtccttattcattataccagaacacatgttcttattcaagcattagactatgaaaaattctatttcataaggaggtactaccatgaaatttggaatgcgcaaaattagccccatgaaatcgctcaaggccaggaccaccggacgagcaaaaagaacggtaaaaaaagcattaatccccggctatggaaaaagggggatggggtggataaagaatcctaaaaaggccgcatataataaagtatataaaaagacttcatttagtctttttgatttatttaaataacgcaagagcccctgtgcagcaaacacaggggcccagccttaccaagggtgtcacggttccccagataagaaatgttgagtacaagacatagtatatcatctttccgggcaccgggcaaccataggtgtaattttacatcaaccgaagagtatagttaaatatgaggagagatgaatatgattaaaggcgcatgttatgtccgcgtatccacggacaatcagttagaaaactacagcattgaagaacagactgaccgattgaaagcatactgtaaagcaaaagatattcagatagtcaagatatataccgacggcggttattccggcggaaacgttaataggcctgctctacaacagatgctccaggacatcggcaaaggattgatagactctgttattgtctacaagcttgaccgcttgtccaggagccagaaagataccctcatgctgattgaggattgtttcttggccaagaatgtggactttgtttccgttaacgagaattttgacacctccactccctttggccgggccatgattggaatactgtctgtctttgcccaactggagaaagaccagattacagagcgctttaccatggggcgcatcggcagggccaagaatgggtattttcatggaggcggtaatgcgccgaccggatatgattatattgacggagaacttataataaatgattatgaggctttgcaggtcaaagatttgtataatcggtttttaaaggggtattcaatacataattgttggcagtatatgcaacaaaaatatggagggtggagcagtgaggtattggttcggaatgttcttagaaacgaactgtatattggaaaagtgaaatttaaaggtgtggcctatcaaggtaatcatcagccaatcatatccgaagacctattccggcaggtacaggacctgtttaacagctccaagaggtcctctaataccttcaagcggtctccgttcaaggcaagcacccttctttccagcatcgtgtattgtggtaagtgtggagcacgatttcatggggagcatggtaattattcctgctacagtcgtactaagggagataaaaaatatattgttgaccccaactgcaaaaataaaaaatggaagatagaagaattggatagactggtattggattacataacgcgtttagatttttcaaaactacataatagtcatccagtccagattccgtccacggattattcgttccgtctggccgagatagataagcagattggaaaactgatagacctgtatcaagtcagcggcatctcgcttgagaccatacaggaaaaaatgaatgcgcttaataaagagaaggaggcactactgattatatcaaaacccaaaaatgtgccagtaacaactcttgctgaaatgataaccgcgcgggataccttgatgtcgctttctgattcaggaagcttggatgaaaaaagggcctgcctaactatgattatagaccgtatcataattgatgatgataatgtcaatatcaaactaaaacagctataatttagtttacaagttttctaataccatgtgtatgggattcggatgcaacgcagcgggcattgtgggatgccgtatcattgattcccccagagaacggcttattgccatgataaccaacaactttgtgccatgcaatggaaggtttccgccaccatacaaagggaaacaaaaatgttcctcggcgctgacaatgaagaaacagccgaattaatcctacctatatatggctttgaagattgggctttaaaactgaaggcctatcgtaaaaagaaccatatcacacaacaagagcttgcacagcttatggacgtaaaacatcttactctccgcagttgggaacaaaaacaagcaaagccaccttacaatgtatggcggcttcacaaacacttatttgatgattccatcaagctcacgtgattttaggttatccagtattttatcaatgacggctatcttatcatcggtcgttagattagaactgtttagcctgcgttccaccacctgtaaatggaattcattgattttatcggaaagtgcgtgcagatccatattgtcaggaatatggacaataacattctgaacacagttccttttcactcacgctctcccttcgataaataccagtcattttatgttatgaaaatatcggtatgtcctattacatcttacgaagctgttccaatctggcacagcttcattttatgctataagcaagtcgaacagccttggcaaagcttacgggaatccacctctgcactaatttcttttacacctccgggtccacctccataagcaatttatattctgggtgctcctttaacgaaaggtcatatttaatcgtgccatattatgtcaaaaccatgccattttatataagttgcttttcttcataacgcctactgccacatgacttaagtcagaaccaagccctgtttctgcctctcctcccaaaatgtcccacttgtgtccgttcccatatccaagctgattcttaacgagacatcaaccgccctcatatctctacaatctaagtgtcctatgtactccaacagtcttgacttatcgattgtgcgaatttgttccaacataataatggaatccttttgcagaacggaattccggttaataaatacatgggtcggcaatggatgcttctccatccggcttgtaactgctgccacaattacggtcgggctgtaacggtttcccacattattctgaacaatgaggactgggcgtacccctccctgttcacagccgaccactggacttaaatccgcatagtaaaaatctcccctgcataacattctcttctccccttcctttctttttgacagtctctgactttacatttagcgatatatctcacctgtaccaattgtctgcgccgctctgaccccacaatcgatatctggagtggaaataatatagcagcaactggtccattagatgcttgtccacatataaatatctgggatgttgattaactaatgttctttaaggcccttctcatattgaggtaggcccttaaattagcctcttgaaacaaatctttcatttactcttcattaatgacatttcattcacatataccttgtctgtatcctcatatcgttctcaatgccacattcatgcagccggccctgacaggcggctgcatgagctggcatcgaaatcaccttctttacaagttattctgcgcttctattcgacactactccccgaagcttgtccagacagactattggatccagacagggcagccaacccgcctgcctgcggctgacaggcatcataggagttccacctccgccaggttctctggcggccgccctcattgcgtggtccccggccaagggggctgtgactggacggaagtatcattataggctatccgggattgtggcgattcaatccgccatggattgattttgagacaggtagttgccgctcttgccttaaacccaggaaaagatatataggttatttgacggaatccattttccgcaggcagtcaccgcgtacctctcttgtcgcttctgctcctcgcatccggatagctaatgtaacgaattggctggatatgaaattttcaatgtacacctgtaagggacttatgaaataaaataccctctactatttaaaagccgaaaaataccacaagtgataaccaactttttaaaaaaattttgagatagaataatatttgattttttcatattattatggtataattaggccataattaattcgaattgagaggtgagtttatgccacagattattccgattaaggatttaaagaatacttccgacatttctgatttatgtcatacatcccaggaaccgattttcatcacaaagaatggttatggcgatatggtaattatgagtatggaaacatatgagaacacggtttggaaatccagcctttaccgcggtctggaagtttccgaagagcaaatacattcaggaaggactaaggacgccagggcatccctggatgagctgaaggataaatatggattataaactgcacattacagaacaggcggttgagcaactggactggatcatcagttatcttgtttccaatttaaagaatcctaccgctgcccgcaagcttttatctgaaattgaaatcatttacagttatttggaatcagacccccatatctaccctcaatgtgacgatccgtttctacggacaaagggttaccacaaagcaactgtcaatcattttcaatatgtaatacttttcttaattgatgataaaagcagaactgtctatatatccggattatttcacgaaaaagaaaattatggccagaaactatagacatctgattccatcgtctcaagggctaaataacaatatgatttataaaaagggcagccattctggtttacgcctgaatggctgccctatattaatacttggaaactctacagcttcatccatatccttaactgttttagaatcttctctttgcgtttatgaaccgctgcctgcgatattccaagctgctttgccaggacacgctctgataccccctgataatacagccggtacagcagatcccgttcttcatctgttaattttaccaatgcaggatacagtttgtccgtgtatatattatggatggctttatcctctatagataacccggaatcatcatatagcagttcctctcccagcatctcatccgtatccagggactgataatgcaggatctcatatggtacctccctagtcaggtacttctttctccgaattacccggtaatgcttcatgtacatatcttcggtgacttccatcagcgaattctgaatgcacacaaaatacacatttccttcaagcttcttatgtgaaacgtatttctgatattcatcatatgtgacttccgataatattccatttttcctgatataatatctcctgtctttcattttcttacctccggctctaaatatcaagtccagaaccgaaggcggtgatctgcaacgcagcgcttcttcatcattaaaaaatgagccgcctatcccacaatcacttgtgaaatatgcagcccatctctgatcattgtaaatctcatccgcacagaatgtactttcagaagcccgtctacctgctcctcttctatgtgaatttccgttatcccaatcacctgtgcattgaattggaatatagtggtttctgtccggtatatcccttttaggatcaccgccgataccatcaactccttaccatggcactacatgatttagggcatccgtttttcaaccattttctttattgataacggaaacatgccctgtggttttccatacttcgtctaaaagctgcaaaatcctatttgataagcaatttcctgtcatcagcatgcgttatcctcccttcctttctgctgttttatctcatggtaggacacttttcaacaatttcttctgcaatcattataacaatttgacctgtagaaattagatatgaaaaaattccattaccgtatccagtaaagcttccaatataatctgcatggactgactgaaggtgatatcttcgagctcatccattagacaataaaataattcacagatagttttatcatcttcatttcgccgttttgccaccgaaagcagcatatatctggtaaatacgattgccacatgggcatttaaggcatcatatgagatacttcggcattcttttaccagtttcagataagatttgcaggatttgaaaaacacctcgatgtcccaacgttttccataaacacggatgagctcttcttccgaaagattcgtatccgtgctgattagggccagccagtctttccggttgctcttattgcggacacacacgattctggccggaagagcctcgtcatcttttttcagagtgacatttacggaaagcaggtattttgaacgtccgcgccgtttccggtttttgctgtagatctgcttgatattaaggttttgcccttcatacagatactttgttttgttcttttttatcaaggcaatggtatccatatggcacttttcttttaaggaaatcagtgtcttaggggatgaaaaccagctgtcgaacagaacatatttggcagaaagaccaaccgcctgagcggatgcaatcagttccagcatgacatcagtcgctttccggcgcaattggctgcggcgttttccagcaatggaacggccatcgaattttttgcagggcaaatcaggttcttgttttccgctgctaaaagcagacaataggtgaccgggacaaaggagtttccatccgaccagcccaaagtaaacatacggtatccttttttatatttcatggagcaatggtcaaaaacgtttgccaaaaattcggtttttttagagcgtgaccgttcaaacaggctgtcatctataatgaagacatctttccgtttttcatcagtaagtgttttcatgaaatcgttaatgattttggaagctagaagcacagtaaaacgctgccagtttgttttcacgctgttcaaaaaacgataaagggtgttttttgagaatccttcttcaaaagttttcgtttttctctgcatatagtgactgcggtcagaaaagagcaggcataacaagtagcgaaagattgtcatgacaggaatccccttttccttacctgcattacactgaaagagaagtttcccgatttgaaactcgttgataaattttgatacaaaatcaaaaatctcattttccttatgccgattatatggtatacttgacatagcatgaatctccttgctgtgtaattgtttctggacaattcaattataccatgcaagctggatttgtgccttttttatgcgttaaagtattgagttttcaaggttcatcacaccaaatggtgtgggaagtttgagttatgtatataatctgtatgttccctccatcaatacttccgtccctgagtacggttgatgtgtcctcagaaagaccattatcatgtatccccctaccctccattggcattacccaatctcttcggtgtcgggtaagggaaccaccttacactcattccctccccaaagaacggaacgtgcggctttcaccgcatttcactcacgcatctataacgcataataaactatctgcgtagctcgattggcacatatcgcttttcttcctgtcaaatcggtgtttcttcgctcgattttctaagtgctcctgttcaagaaagggggttttattaagtgtcatttgcccctttcatactattggcatgtccatcatcaggaacaggatgttcttttctgtcatatacgtccattttcttcctttatgtgtcttccgatatttattaactatccactgttttcccttgtttggatgtctccttttcgcccatctccataacattttccatatacgatggtctattgtgctaaaggatttcttagcccaggtagcgtgatggtaattcgcccatccccggataatctcattcaccctgctgattaaaatttcttgctttatagtttgactgttcttaatcagttcactgactttctgtgtgattttacacatggatttgtgggacggcatgatgattagctttcctttgaactttcggaaaatccatctcaggaaatcaaaaccttcatctatatgtgtaatcactgttttctcctttgacagggtcagtcttcttggttttaggaagtcttctatcattcgtttgatatcttccagtgtttccttatccgatgctgtaactataaaatcatccgcactatgccgaattcggcatagtttcaacttcggtatagtccgcatacctcacaaaccgcaatccccgtttctccaactcctgctatctcctgctggattaccctgtccatgacggttggtatcccgagttttctcctgcttccgtttggcttggggatttctactcgtcttactggctgaggatggtactccctcttcctgatttgctccctgatactgtcccagttctcacggatatatccgtcgagttctttaatctccatgccgtccactccgcctgctcctttattggcgcagaccttctcgtatgcttcgttcatgtttctgttgtccagtatcttttctaacagttccgacatgctttgtgtgcttcgctcctttccgctccctgtgataagtcctatattttcgcgtttacagctcctatacgtttcgcctacatccgctgtcagatatccacaggtacatacattcgtctgcacggttacattgttcagcccttcagcaattttttttaacaagattgcctactatggcttctgctgacttctcacgataaatcgttttcaaccgcaagcgggatacttcaaccacttcaaccaatacttacgtccgtgagacctcacgggataagtccgtgttctttcctcgtctaccctcctaatttacgcacataggttacggctacctttagggcttcgttgctttaagccaacttacccgccatgcacgccttattatcaggtttctgtccgtagggctacgatttcgctatcccttcttctcgcccacatctcacgatatgaaccttgggagtcgctataaagttcgtcggtagctacgcctatgtggactttcaccacagaacacgggcatgcccgtcatactttattaaaccgtaccattgctgatacggctctacaaatactattgacttattttcatttttcatctatttcaaaggcataaatattattcctctgtacttttatcaatccagttatccccatcatagttcaaaatctgttctgataattttttaatatatggttgtgctttttctctttaattcttttccatcaaagtcaggccctcagatatctgtgctatcaattctgttgcttctgactgacaggtatgcccctttattttatacggcaaggaaggaagttggctattttatagctattgtcaatgattgcattgattccatagaaaatttcaatctcaaagcacagcaaaagatggtagaataatgatagattttctacagattggagttcctgccttgaataaactgatgatccagatggagggcattgtaaaacggttcggctccatcacagctcttgataacatgaattttcatgcctacggcggagagattacagccattgtcggcgacaatggttccggaaaaagcacgctgattcagatcctcaccggatgcctgaagccggatcagggtgtcatccagattaaagaccgtgtatttcattctcttaccgcaaaggaggcaatggagcagggaattacagccgtctatcaggatctggcccttgacaactgcaaggattgcgccggcaatctttttttaggacgtgagcttctgcatttcggtatttttcttgatcacagagccatgtatcaggaaacagaaaagcttctgagacagttccatatccgtattccggatatccggcagccggtagagaaaatgtcaggtgggcaacgccaggccgtcgccattgcgcgggccgtctatcagaatggcgatattatgatttttgatgaacctacctcggcaatgggaatgaaggagacggaacggattatgaatctgtttcgcaccttaaagaaacagggaaaaaccattatcctgatcagccacaacttgtttcaggtctatgacatttccgaccggatatgcgtaatcaaaaacggcagacaggtggatttcttcctgacaagggacagttccccggaacagctgtaccagtcgattattgaaagggaagaacaggcggatgatgaaaaaatggatgagtaaatactcgcagcagctttttctgtctgctgtgctgcttattatctgcgcggttcttgcaggaaaaagcgaatacttctttacatggaaaaatatacgaaatatcctggaggcagccagttaccggatgattctggcagtcggcatgacctttgtcattgcatccggagtaatggatctgtccgccggttccattgtgtctctctgcggagtcctgacagcgctggctctccatgggggaattgaaatttgggcggctgtcctcacaggcattgcggcaggaggcctgatgggggctttaaatggcgccctcattcactgtacgggaattaattttttcgtactcaccctggcctccggcggtatgctccgcggaatttccctgatgattacggacggaaaacccattaccaagtttggaaaggcttttatgcagttgggaatcggccgcatcggggaattccagtttccggtgcttttcgccctgacactgattcttctgtcctctcccctgatgtttcatgtaaaatggggaaattacgtacaggccctgggcggcagtgagacggcgctgaagcggtcgggagtgcggaccggcttctaccgcatatccgttcacgtttttttaggtattacggcggccgtcacagcagtgattatcacagcacgcctgaattctgctgagccaaacgccggcatgaacatggagctggacgccatcacggcagtgattatgggaggcacgccgatccgcggcggaaacgccagcattgccggaactgtcctggctgtgctgatattgggaattatcagaaacgggctgacgcttttaagcgtgtcctctgatttccagcaatgggtcacaggctttctgttgctggcgtctgtacttatttcagagattagagtctggaatacaagggctttaataaaatagtaactatttattattaaaattcaaaaaggttaaggaggttatcatgagaaaatttattacaggcttattggcagccggatgtatagcagcggtattaaccggatgcagcagctcaggcggcgcaaaggaaacgtctgctccggaaacatctgcggcagctgcgaaggaaacagaatcagagcccgccaaggaggctgtttctgctaccgttgctgagactgaatcagctgacaaggccgggctgctgctggctgatgtggaaaagaggatgaacgaggctctgggagagctccccaaaagcggccagggcgaaaagataggtgttcttatcagctccacctccaatgagttctggggaaccatgaagacacgctacgaggaagcggcagaggatctcggaattgagataagggtatttgaggcagatgccgaagatgacacccagggccagttagacgccttaaacaccatggttacaatgggttttgacgccattatcctgtctcctattgacggaacgaatctgattccgggcatcgtagctgccaatgaggcagagatacctgtcataaatcttggacccggcgtagacgcagaagccctggctgacgcaggcggtcatctggacggtaaaatcactgtaaattttgaggagcagggcagcactgtagccaatgacatgatttccagaatggaggatggtggaaaggttgccattctagcagggctggaaggagcaggacagagtgttggaaggacaaatggagccaaaactgttttcgagaacacagaaggcgtggagttggtagctgcgcaggcctgtgactgggatacagaaaaagcctacgaggccactaaggacattctcacagcgcacccggatctgaagggaatctttgcctgcaacgacaacatggcgttagctgctgttcaggctcttcaggaaatgggcaataaggatgttatggtttacggcgtagactacaccactgacgcaaaggcagccattgaggacggaaccatgatgggaagcatgacctactccagcgctatttacacaaaggcggctgaggagatggctatgctcatcgtccagggaaaaacctttaaagatccggtttacctgcctttgacacttgtcactcaggacaatgtcgctgattttgaaggctggaaataaaaatgaaatacttaattgaaacagcgcttctgactcacggtctgcgctctctgacaaataattacctccttgaaaactggacgcttccagaggcccttattgcctggatttacaaaggagaaatcaaaatcggaaccatcactaagtatctctccttccggacagaggctcaatccgccataagaattgattgcagtatcctggagaatgctcttaaaaacggagtctccggcgcgctcactgcctccggaaccatggcggtatgcaaaaagctcggtatcccggctgcggttacctgcggcatgggcggtatcggagagatcaagggtgaggagctttgcccagatctccccgctttagctgaaatccctatcattctgatatccaccgggcccaaggatatgctggaacggaaagccacagtatcctggctcacctcccacggtgtccaggtcatcggagcgaaccgcggcttctgtacaggatatttgtttcacggcgagcctgtaaaactccagggagtgctcagatctgccggctgccggacaaaggcaggaatgccggagggggagctttgccccccgcttctgattattaatgaaatcccggaaaaactgagggtgtctgaccgtcagatcctgacagaggccatcatagaaggaaaacgggcggaacaggagggccgatactaccatccggccgccaacggcaaaatagatgagatgacaaacggatattcctccgaaattcagctggcatcccttctggacaatgcgcggctggcaggacagatagaatcaagcaggtaaaaaatgtccggaattataatatacctaaatatttccaatttacagacaatttaagaaaactgtaagccctataaatgcaatatttagtaccctatgagaatatgcaagaatcgctcaattagtaacaaattagtaacaataattatatcccgtttgaggcaggtggacaatgactaatatatcagaaaagggagtgcccattttaggcgctccccagcatttttacaaaggtattccttttaatccgtttattaaataatagactcgcatcacagatgcactgaagttctttgcaacaagaaattcaaggatggcagttacatttttgtcgtattgttccatgtggtatcacctccataaatttgatgattcttttatcaaggataaggctgattattatccacatcttttattgaaaaatactttgatttatgctatctatggcaaaagataaggataaaaatatcctatgtataagctgagattattggtaaagcagcaccgtccatcttccagataggtctctgctgcatcacgccggttgagaacatagttgactgctttgtccatccgggtattcagaacaggcttctgttggttgagccatgaccaaaaagcctccagaacgggcttttccttctcgaggcgtagctacttgcgcttttcataatcaccggggtactttttgttaatggagtcctctatgacaaacaaacggctgcagtactggacaccctgtactgcaggctggctgtaatcatactgctttcctttcggcacggcatcgataaaataccggcggatatgggcccagcaggaacaacgtttgatccctggcaggctgttgtacccctgataaccgtcggtttccagatacccgctgtagccttccaggaattcctttgcctggctgccgctcctggtcggggaataaccatacaggatgagtgccgggtacccatcctcaccacttcgaaacagccacataaatgactgggactgggctttacgcccttcctcattcagcacctggacgtttccggtggaagtaatcatacaacggctggaaatagttctgtgagcagtagatgttctagttggcaaaggtggtccggctgatctgagcgccatactgtttccagtccttttcctagcggtaaagagggagcccgttggcgtacttctggtacatcgtccacgcaacagtggatgccgaggcagggcctttcccaatcatggtcgccggaacctgggactttatgatcacaggtttttctgtatctccatggccttctttgcaggaggggcatccataactctggctgtagtattcaatgactttacatgtggctggaacgaattccagttcccggcggacatactcctcgccgatcaggaccatctgcgtgccgcagactggacagacctgttcttcttctggaagagggatgactactttttccaccctcagacctttgaagagatcatcatgggctgctttctttttacgggtattctccctgatcacagtctcttcttccaacagggacggatcctgttctatttctgcttcatcaaaaagattctgttgtcctggaatgtcatcggctcttctttcgctggatgggccgaaaagtttttgagtaagatagtctacctgttcctgcaatgctttttcacggctggacttttcgtcaatcataagacggagggatttgattagctccgtctgttcagataccattgtgttcagttgtaagattgtatctttcagttctctgagctggatattttttgcactggaagccatcgtttctctcctgggatttcataaccttattatatcaaaagcggggccgttatcaagggaaaatacaacctggaaactgctagttttcactccgctttcagtgctttgggctggtcaatatcgattccagacatcagccagtcaaactccctccaggaaagattccggacctctgactgcttcctgggccattgataaccgccgtggatagccagccgcttatagatcagaacgaatccgtccgcttcccggaacaaagctttgatcctgtcccgtcttcttccgtagaaaaggaagagagcactggacaatggatccatcttaagctggtcttctatgatggcacagagcccatcgatggatttgcgcatatcggtgtagccgcacacaatgtagatcttcttaagttcggaaatgtcgcctaacataagaactccaaaagcatctgaaaggttctggtaagcagagcaggctcagcatcattacggatacggatagtgatatccttcacagcaatttcgatcgtatgtgaattgttaaagtacgtttcctgcatctttgatgactcatgttgttccggaaaagaatgcggtacaaggtcaatgggaatgacgtcttgtttcggacgcggatcctcaagatgaccgttgcaatgccgttttcacggcaccagtcagcatctgtcatgccgctctggcggcattcattaatccgcctaatctgttccggcattagaacacgggttttgcgagtaactgacataacctatcctccataaatgtaatgaaataatctaaatatctttcgactactattataagttaaacaggagggctatgaaatccggtggaatatttggcgcttaccttattactgtacattgggtcgaatagattctcatttgcagcaatccagtcaatgatgaactgataagctctctctgcctgagacacctctgcctccattttaagaaatcccaccccttccagcaggtcaacggccttctcccctgggaataggcattcccctgccagctgatccgccaggaggatacaggcaatgctctgacctgctttcccgtgctctgtgccaggataaatagtttttggcaaagaaccttatgccgtcctatcaattctgtgtccgtaatcccttgaacatgccgcacaaacttctctccagcatgtccattatgttccctgacagtctccaggacatgtgcaaaatctgtaaataacggattatcaatctctcgctgctgttcctcaacagccttcctttttccttgccttccgtcatcgcataaatcaacttctccaggttccctcttgaaagctgtgtctcatctacaaatacgggtaggctcttcattaggactgccctgcttgtacaataattgatggtggaatccacggacaggataagctcgtccggaataccccagatggaggccgccaccataaaggccaccgtctttccagtcccgaaagctccccagagatggagtacgaaacagagacagttgattttcttaatcaggatggaagccaggcttgcatccatcagcatctgtacaaataggttcttcctatattccatacaccccttctgccaggtatcaaatgagccgcgggggcctacggcctgcacggtttttgcctgtgcgttgtccccatcaaacatgatgtccttgacgtagggaaagaactgtttcccaatccatgcgaaatgggacacggctttcgtaaccggcaggctatcctcatttatcctgtacatgtcagatatgtaattcacaaggttcttcgctttctgatcattgacaaccacgcccaggttggcaagcgtgacgatcttagtcttggagcagcattccgccggctccaccttgatatctttccacatgaattttccattcctcctgacactgaatgcaatatcatatttctgttcccctgtctcaatattcttcgtaagcccgaccggcagtatttgttgataggaaacatctatgaggacgggagggtccgtatccttctttccctgcacccacttatataccccttccttattgcatatccagtcctcacacctaagctggataggagcatccacgaactgggttattccttctttagtcggcggggccttccccgaatacggtgctgttgacttctggtacttaagggcgctctctactttctgcttaatctctttatccgtcaaaggcgggaaacacctggttccattctcggtcattgctgcagccagaatggcctcatctgacaatcctttggcttgtaaactgcaggccaggcggaaaatagtgttatcccggctgccttctcaatgacaaattcatccggggcctgttcccattcataccgattaccattttcatgtatactggatggagccacaaagtaaccaccgtccccacatatatcaactgccggttatcgtccgtcatgtatctggcagttgcccctgctctgcttcccagtcccttaaagtctcgttgccatgctttcctttttccttgtcaatatccaaatcaatgacaataagtccgccgctaacttggccagttgctattccaatgttataattcggattcttcatccaccacttgtcaatctggttaaaatccgttgtggcatcctgaaatccgtgttgtgtggcaggatttttggatttcggaactaaggggaacactgccatccccactttcgcataagccagcgcatattgtcttaaactatagtctttcaacatcctttacctgccctccatttaaaagtatgataaaacctcatctggtactttcagaaccagcttaacattatcttctccgtagtcctcagtagcatgtgttgggtttgaattaaccagttgctatatataaaggcttgcgtcgttacaccgttaatggcccctatttggataaaaatgtattttaattaactttttatcccattatttttctgttaatttattatttttatattatttttcattcttctattgtaatattactaaattatcgtatacttaagtaaaggaggtgaatccatggaaactagaatacttatcgttagcaaggattcctatttaagaaaccaactataccaaattttgtatactgccagctatgactgctatcttgcatctacccgtcttgcagcttctgttatctgtaaaatgtttactcccgatgtcattatgattgacataattttacccttcagagatatagcagagcttttgaaaatggtacctgccgattgttcctgcaacgttattgctattaagccaaatcttttccctcaaccattaattgattacgacataaaatataatctttctcaaccacttgattactcatcaactatgaatttattttcaacattgccaaatcagccctaattaatatctttcttttcatatcaaatccacatcatatctgatattaatttataaaaattttaaataactgtctttttatattttagacatacctaagacatatatttcatatatgcttagactatcaaatggtcagagctttgattttatatatttgtccctaagccggtgaggcacaattatgagcctcaccggctctccccacaggaaaggatggaaatatagaatatctgcaaatacatgtttcatcataatcaggaggtgttcgctatgaaaaatgaattttatactttactaatggtgtccggatgcaaaaaaaccttaaaaggattttccaatactgataaccatggggattttcttttattcccaatggagttttcaccgttctttagcattggcacttttcttgaaagtcctaccggccctatccgaatcaatgaaatgggagagtttctgatctttaaaaccaacatgctgcggttgtactataaaccgctccctctattaccctcctccaatcgaccagtatcatgtttaaaatcatccaggataactagtctattgccatgtccaccaaaattttaagtaacagcagttgataccacagaaattacatctcattccgttccctctgcctttatcttaacttgtgacgtcataagttccggatccaatccctttacaaacaccaccggcgcccaatggtccgtcttatactgcaccgcgcgctgtacctttggcagggtaagggcggccccatccataagataccgcaggggatgcgctggctcccggtaggccactccctcatgcaacagctccgtcatcaggtcaaaggcttccgcattccagccactccagaacactacatgttcgcagacatccgaacaggacagcagttttcctttgtagtcatagcccttcttctcaaacagccactgcagttccgcatagctggccgattcattcttgtttatgtagtccaccacaattttctttatctcttctttattcatgttgttctcccttctgttgcgatatcgcaatggataatacgtggttattgcgtttatatttgcaatacctacactccccactcattcttaagctggttcagcagcttcatttcctcagatgtgtctttccccagttctgtgtgatgtttataactaagttggaaacacagaatagacggcagttcctctggtgttatgtgtttaactgttatatctttcaactacatgtcgctaccccctcattcccttgcttgttcctctaccacgtacctgtctcatgcccaggatgaagtagtacacattccatactgcatttacatacctcccattgaggaacactacaattacattgattagattctccttgaccatgtcatccttgcctgtggcatgttctatgtcccacttctgttgcaccggtacaacctttccagtattttcaagaactgttttcagtaaccccttgaggtcatctatctcctccatggctttgtcatagctttctagcattcggttatatcgttcttctgatataaagcgcctaaatattgggtaggtagccaaggaaccatttcccattcataatggtagtaagtagttttttactacactatcctattggtaatcttatatccgataggatgatgaaacggaggaggttccatgacaaagcgccggatctatcgttctgagcaagaatggctccaaattatcacggagggccgccagagcggcttgacggatcatgcatggtgtgaactacataacatcagcaacagttctttttataatgctgcaaccaggctgcgtaaaaaggcctgccagattcccgaaccagaaaaaacgtcctatgttctggatttcacctcccaccaggaggtggtaaaaattgatattattccaagtcctcttttatctgattttggatgtatgcctttattgccgccgtattctttcctactgtgtccacgtaatatccacggcaccagaaatgacggtttccgtacttatactttaggttcgcatgcttctcgaatatcatgagtgaactttttcctttgagatatcccaccacctctgatactgaatatttgggcggaatgcttaccagcatatgaatatgatctggcatgcattgtgcctcgattatctcgattccttttcttcggcataatgtcccaaggatttgtcctacatctgccttgatatctttatagattacctgtctacgatattttggtgcaaaaaccagatgatacttgcaatcccattttgtgtgcgctaaactattattgtccattttggacctcctgtgctttttatttgtggtttgcagacctacatctagtttagcacaggagttgcttttatctgaagatattccctccacctgcagagcaggtggtttatttttactgtgacacaatagaaaagcgtcgcaatcccttttaggactgcgacgctcgattagcctgcttgctcttatttttgttttttccacggcaaagctgtccacccttgtcgggcagatatgaatacaggctattgtcgtaagaaatatattcgccgtccaaaaactgttcaaaaaactgttcccggaaaaacatatgccatggattggatgccagcagataaaacaggatatacagcaagcattttcgatgtactgaaaaagttgtttcttttgtggcaccgactaccaatacccgctttttcatgttggcctcctttccacaaaaagcaatgagccgttgtccaaagttggataacggctcttacttaaatacttataaagttattcaataagagcttgagattatcccttcaaagacagctctttattgttaaatatgcacttgtcagttacactcgtacccttgtaaccttaatactttccctgccctgcaagcacctcggtagcccctgccaaataaagaggttcggtttggaaatccgtacccgtatcttccctcagttctttccgacgtttgttgatcttcataaattttgttcgttctgcatttttctctgcattgtatttataaagacattaacttatatgctcacatccgctgtaatccgcgcagccatacatctcgaacgtctgggtataactatcctgttctttgctctccgtccggatatgccgcagttccctccaccatgactaactggcaattgaacatatgcttctctttcatccgcataaacgttgcttccaggtcggtcttggaatagcctttacggtctttccccatgagctcaaagcattcattccttatattccatcagacggctcccacacagctccagctcatcatagagcttctggatttccgttttctgttttcccttcccataaacgaatcggattccatccctttcagttgtccgttttaggttttcctgcaatttcaggagctcaagcggggaacatctgtcgatctctatgagcgtatgattagaaaaccagttgataagttcggccaagttgggtatgaacttttgtagtgtaattatttattcgcatacttaattatatcacggatggcggactcttcggagtgcgtttttccatttcccggcaccagaaaggagcatatcatagactattcatctacttttgcagacagctccctactgattaattgtttctggcttcttccatggctttctcaccaattgcctgggcatccttcagggcgctgtccaaatccttttctccgctgaataccaggtccagctgttcgcccagagcatccagcgcattgatgcctccgatattcctggttccctggaacccgttatccatattatcaaagcaaagctgtttgataggtttttccgccagaacagcagcaaataccggggcatgctgggctgacctgcgcacgggtatgtagcctgtctgggctgcaaaataagcggtattctctgtattggtcaggaatttaataaaatcccatgccgcctgcttctgctctttgcttcctgtgttgaatacagttatattggttccatagtagagctggtcatttgtcttataggctggaagggctgccgcattgattatgattccctccaatgcatcgttttcaatatagggaagggctgaagtggatgccacgcacatggccgcgcgaccctgctgcacaggaacattggcattcttgtcctcacctgcaaaccttactgtttttgcctggaacatactgttcaggaactggatagcttccttggtctcaggcgtatcaaagtaaagctcgttggtctcctcattcatggtcctgccaccgcactgcttcagccagggcgcaatatccgtggacaggttgtttgcaaacacggtgccgtaaacatccggttccccgtccccatccgtatcctttgtcagctttttattggcagcttcccattcttcccatgtcgtgggaacctccacgcctgcctcctccagcattccttcattataatacagcaccatcatgctcttattaaaaggcatagcatactgcttaccatcccagatgccatcatcaaaaaacattttcgggatatcatcataatcttcctggataaatccggctccctccgcctgcatatagggcgtcaggtcttcaaccaaatccttggaaatataccaagagagccggttggaatacacctgggccatggttggcagctggtctgccttggcagaggccattaatttgtcgaacaaatccaggtagccgccctggttcacaagggttacctttacatcgggacgccctgccataaaatcatctgctatcttctggattgcctcttcattgacgccgctcattgcatgccaccatgtgatttccacctggctgtccccggcattttcctgtttctgcgcctcggactgcgtctgtgcaggcgtcccggcgggcgctgctgtctcctgtttgctgccgcaggcagccatggagcacaccatggctgctgccatgaaccccaacatcatttttctcatgttcttttcctccaatatacatattgtttttatgaaaaaccatttggttttttccgtattccatccactgtcatcacccttttaagccggcgctgctcaccccccggataatatatttccgggcaaaaaaatataccagcagtatgggtgagataatcataagtgaaaatgccatcagcgtattatactgtacgccggcctctgtggaaaatgcagccagcgctacgggcagggttctcatttcattggtattggtcacaatcaacggccacatataggaattccagctgttaatgagtttgagcagtgcaatcgccactatggtaggcttgctcatggggaccatgacagtgattagataccgaaatctgcggcatccgtctatacgggcagccttataataagcagccggtatggatgaaaactgctgcttcagcaaaaagatggaaaacacgctggcgcaccatggcagaataagggctttatatgtattaatccaacccaaatccgccagcgtcacataattaggtataatcagtatctcccccggcaccatcatggttgccaccaggagcatgaacagagcgtccctgcccttaaaatccatctgggaaaatgcataggcagccagtatggtggtgaccaattcccctgccgtgattgcaagggagactatggcactgttgaaaaaataaactgcaaaaggggctgcgcggtacgcatccacataattttcccacataatgacagacgggaaacatttaggaggcatcatcagaacctccctggacggtttcagcgaggtaagaagcatccacacaaagggcagcagcacaaaggcagctccggccagcaagatacaatatcccccggcccttgcagcacgtttctttaatcccatgatttcctccttctggacagcagaaactgcagcagtgtaattgcaaaaatcaacagaaacaaaaagaaggctgcggctgcggctatagagaattcccaatgctcgtaaaatttattaaatatgtagtagacaatggtaagaccgctcctggacggtcccggcttatggttatacatgacatagacttcatcaaatgtcttaaaacatccaatgaccgtggttatggagaggaatataagaattggcttcagcatgggaatggtcacatgccagaaccggttcatggtcctggccccgtccacccgtgcagcgctatagtaccttttatcaattccctgaagggctgccagaaagataataatcctgtaccccaatcctttccatatgcacaatgccaccagtatgggcatggtcatgtgcctgtccgtcatccaggcgattttctttcctccaaaaaaacgtataaccccatttaccagaccgtaatccttgttaagcatccagctccacacaatggataccgccaccatggaagtgacaaagggcagaaagtaaacactctggaaaaaaggcttgaaccgtatgttgctgtttaacagcagagcaaacaaaagacctgagccaatggacaggggcgccgcaaaaaacaccagtacacatgtattcttcattgcaatccggaaattctcatcgcacaggatgtatctgaaatttcccagtccccattcgtacaccgtgtctgtcagatagtcaaacctggtgtaaaaccccatcataaaagatttatatatgggatacacctgaaatgtaagcaatatggccagggccggcgccagatatagccaggcactcatctctccccatgttctggtcttttgtccccgttttaaacctgtatcctttttatttcccagctctcccattacactctgtttcacctttctccgggaaaaggtatattttctttaccgccagatttataacatcacctatcccgtaattatggtcccagcttacacaggctgtcagcctgtggccccaggtctccaccttcaggtaaatttcctttccaagggtctggacagcaatcaccctccccctaaaatcactgtgttcccggctggccaccacataaatatcctccggcctgacacctgcctccaggtctgcctgttcctcaggcagaccggtctgctcccacacgcactttttaaccggcagctccatgctgccatgaccgcagtcctgtaccatcaattttcccccaaccatccggcaggtaaggaagttaatcggcggatttccaaggaaaccagctgtaaaccggttggcaggatgggtatacatatccttgggtgtggaatactgctgcatcaccccttccttcagcagaagaatcctgtccgatatactcatagcctcttcctggtcatgggtcacgaatatggtggtgatccccagctgtttctgcaaggaacgtatttcatccctcagttcaattctaagtcttgcatccagattggaaaatggctcgtccagcaaaagaatcttcggccgttttaccagtgctcttgcaatcgccactctctgctgctgccctcctgacagctggctgggtctgcggtttaaaagatcttcaatctgcatcatcccagccactgcccttaccctttcctcccgctgtgccttcgcaatatggcgcatacgaaggggaaactcaatattccggcctaccgtcatatggggatacagggcatagttctggaataccataccgatgtccctgtcctctgcctccacctggttcactctcttaccatcaaaaaaaatatcgccttttgtaggcggttccaaacccgcaatcatggaaagtgtggtgcttttcccacagcccgacggccccagaaggcacaccagctccccttccctgatttcgacggacagccctttaacagccgtggtgttcctgaatttcttggttatatcctttaaaataatcaccaactatcccctcccgtgtcttatgtacctgcaaccaaagacatgactgcctgcaggtcccctggcttaagtccctccacaggcagctggattccttcttcctccatcatggacttaaggacctccatcatgactcctgttcccggcgcgctatgacaggtggacagtacctcctgcaagtccgtccttccggagaactctcctccccagcacccgctgcaggtacgcgacactccgcagcttggactgccgtcaatgccaaccacacccagcacagaaaaacgcccctgttctcccggtgccatatatgccttcatctgagtgagaataggctccagaatttttctgcaatgctccctgaaaaacggattgtcaaactgctcctttgtatgtccccaccgacctggtccataaagggtaaattccggacaaggcagctgaaccagctgaattccctgttcaactgtctttaccacaaactccagcctggactcttcctcctttttcccggtatccccgtaccgtaccaccttggcggctgtgttcaaaatacaatgactgacaaacaatatcttctgcatactatatatccacacctttggctgtttttcgctcctgcatttgattactctgacctataagcgtaactttcattatagcaccttataagcttgtattttaataggatatttctatatggatttttatataatatataatttctatttcattgcaattccacccatccggtggcaggccaccctgtgtcccggataaatttcctccagctcaggagccgacctacggcattggtcacaggtgtaagggcagcgggtgtggaacacacatcccttaaattcatcggtgtacatcggcagttcgcctttaagagagaccgttctcttcttgttaaagtccggaatggaggcaaataatgcctgtgtatacggatgaaggggatgagaaaagagttcgtccgtaccggcctcttccaccagtgtaccaagatacataacgccgatacggctggatatataccgcaccacgccgatatcgtgggatatgaacagcagacttaggttcatctctctctgcagggaggtcagcatgttcagaatctgagactgaatggacacatccagcgcagaaaccggctcatcacagataatcagcttcgggtcgataatcagcgcccttgcaatacccaaccgctgcacctgtccgccggacagctcgtgtggatagcggaagtaataatcatcggacaatccgaccattcccagaatttccatcaccttttggcggcgctcttctccgtctttcatcccctggactataaggggttcctccagcagggccccgacgcgtgagcggggattcagggaggacaatgtatcctgaaagaccatctgcaaatcccggcgcagagggcggaattcactgtcactcagcctggtcaggtcctggcctttataaaggatttcaccgctgtcaggttttaccagacccaggatggaccgtcccgtagtgctctttccgcagccggattcccccaccaggccataggtctcgccctcgtacagcgccaggcacatattggagactgcccgcatatatgtcctgggaggaaacagctttcccagagggccatatacagggtagcgtttctgaaggttcttcatttctaaaagtggcgtcttcatcttacatcacctcctgttccgtaacatatttccaacactttgctttatggccgggatacacctccacagatggagggttttgcagcatacagcgctggtcagcgtaaggacagcgggtacagaaacggcatccctcaggcacattggacaagggcggcaccacgccagaaatcacatgcaggggctggctgcggtctgaatccagacgcgggatacagtccaaaagcccctgggtgtatgggtgaaggggacgggcaaataatgcttcagcctgggcctcctcaacaagattgccaagatacataacgcggacactgtggcagatctgggccatggctcccaggtcatgggtgataaacaggactgacatccccatgcgctcgttcagttctgcaatcaggtttaaaatctgctcttgtatggtaacatccagagccgtggtgggttcatcggcaatcagcagcttcggctcacaggacagagccatggcaatcatcaccctctgctgcataccgcctgacagttcgtaaggatactttgtcatacagtcctgcgggttgggtatgccggtcaggtgcagcagctccccgcaccgttcctcagcctgctgttttgtcatctttttatgcagtatcagcacttccgatagctgtctgccgacggtgtgaaccgggcttaaggatgtcatagggtcctgaaaaatgactgcaatccggttgccccgtactccgcgcatttcagcctgggacacctttaaaaggtccttgccctcaaacaatacctggccttcatagttcacatccgagtcgtattcccgcagacgcaggattgactgggacataacgcttttgcccgagccggattcccccacaacgcccacgatttctccgggcctgatgctcagactcacgccgtccaccgctgtcagtacttttttccgggccgtaaaccttaccttcaaattacggatttccagcaatgtccctgcttcatcagtcattttatcttgtattatattttgcatttcgtctgttttcattatcctttcttcctccctgccgtacgcgggtcaaggtaatcccgcagtccatcacccaacagattcaggctgagtacgcaaagcactactgccagccccggaaacagaacggtccatggcgctttctgaagcacctgcttactgccctgcagaatgttgccccagcttgcagccggggcaggaatgcccgcccccagaaagctcagtgacgcctcagagatgattgcctgtgcgaaaataaaggatgcctgaaccgtcagaggcgagattacgctcggcaggatcagtttccagagtatgcgtccactgcctgcgccctgtaccttggctgcttccacatagggcaggcccctggtcaccagggcgctgctgcgcacaatccgggcaacactgggggtgtagacgatggtcagggctattattacatttagattgcttgctcccagcgcagccataagcgcaatggccaacagaacacctggtatggctatcaggccctcacagatacgcatgaggatgtgatccaggattttgaagtagctggcatagataccggtgaccgtacccaggacgcaggacagcagcgccacggcgccgcctaccaaaagagagactcttgccccatagagcacgcgaatcatcaaatcccggccgaattcatcggtgccaaagggatggtttagacttggccccttcagacggtctgcaatagccatttcattggggtccacattgacagcagcaggaatgattatggcagccagcgcaatgagaataaaaacggtaagtcctataatcagtcctggattggaaaaaaaacgctcacggcaaatctgacgctgttcgcggaggatgacttcacttgtctggcaatccgttgcggtatttgatattttcatgatcttctcctcccctacttgtttccaagctgtatgcgcgggtccacaaaaccgtacagaatatccactgcaaggttaaccagcacataaataaatgttacaaacagaaccactccctgaataacaaaaacatcccggcgtgtaatagaggtcatggtgagcatgcccagtcccggtatgttaaacagtgtctcggtaacaatggttcctgttacaagactgccaaaggactgccctactaccgtcaatatagtgggaccggcatttttcagtccgtagaccaggaccacagcagattccttcaggccctttgcccgggctgtacggatgtaattcatatacaatacatccagcatagccgagcgggacatacgggtgatataggcggcctggaccactcccagcgatagtgccgggagcagcagataccggagatgttcaagaatcccctggctcatctgcacataacctgccacaggaagccatttcagatggacgccgaaaaacagcatcagaaacatactgaggaggaaaccaggtatggcgattcccagcagagaagccgataccgtaatcatgtcaacgcaggttccccgtctatatgcagccagaattcccaaggggacagcgataaccaaagatataagctgcgcgaaaacagccaggctgaaagttggggcaaagtattcccctatggcatccagcacggtggtctgaaggaaataggactgtccccaatcaccgtggagcatgtttatgaaccagtctgcgtactgcacaaaaaaggggcggtcaaaccccagctctgcatttaaatctgcaatggcttctggagttgcctccatgcctaaaagtgctgtggctggtcctccgggaatcatatagaccaccaggaaaaccaccacggacaccacgaacagagtcggaatcagagagagaatccgctttatgatataagataacattattatttccttcccatccaatcatccatattgatgtgacaaaaagcaggtgggggagaacccgccacctgctggtaaaccatacattatacaggaactttcacattccagtaaagcggaaagtcaaagaaattaaagccttccacgccggcccctgtggccatcaggccgctgtagtgtcccagaacgcttgccgccccatattcgtacaggaattcctgcaaatcatcccatttttcggaggattcctcagcggaggccgccatacggattgcggatatcccctggtccacctccggacggtccagtccggcccaatccttggtcaggacggaaagctgaaccggattcaggttataacggttgctggttatatacagggagaactggtccggattggccctgtgctccatgaaggttgcaaaatcatagctctcaaccactgcattgataccggcgctctgtaattcagcctggacaaccagggttgcattatacatctcgccataatcaggggttgttaccaggacaatttcctcattgttataaccggcctcggtcaacagctcctttgctttctctatgttattctgattataatattctgaacccgcatcactgccccacatcgcgtcatccggattgcaccagcccggattgagcacatacaggttggggtcgccgtagcttgccagcataatatcgtcacaattcaggcaggccataatagcctggcgcatctgctcattggtcatgattccttttgtggtattaaagaacaggttgatggttcctgcggtctttacatagaatttaagactgctgtcaccggaaagctcctggtatctctcctgcggcatctcttccgcaatgtcatactggccagtctgtacgccggcgacccgggtggaatcgtctgttaccacacggaagtaaatatccggggtggctgccagcttttcgcctgtgaaaccggaggacactccggcgggctgcgcatagtcctcatacttgaccagatgaatgtactggtcctgtttccactcgtccagtttgtaagggcctgtgcctatatattccgttataccctctgttcctgcagaatcaatgacggatttcggatagactgcagggaactgaatggatgcagctaccacggtcatggcatcggcatacgcctccggcagtgtcatggtaatggtataatcatctgctttttcaaatacggttccttccagaagggcctttgccttgccggataattccagccagcgggacatggatgcaaccacgtcatccgctgtcatttcctgtccattgtgaaacttgacgccctggcgcaatttgattgtgtagacttttccatcttcacttacagtgtaggaatcagccagtacgccggccggctcataatttgcatccattgcaaacaaaggctcatagatatgggtgccgattcctcctacaatgttggaattgacgccgtgaacatccagtgttggcggatttgcggtgattgcaacgttcagctccgtcttatattctgtttcccctgtcccctgtgcagtttctgttccctgggtgtttcctgttcccttagccgtatctcccgcaaccgcagaggtggcctcctcctttgccccgccggactggccacatgcagtcagcatcacagcgctgagagccagggcaagcaaacggaaccatttcctgtgtttcataatagtaaaaccttcctttccgacagatacaggtaccgttaaaacagccggcagctctgtatccagagcgttgaatgatgtaaaaaatgacgtcctgattataacatttgtgtattttcttgtctacttccaccaattccaggtttagttcaaatattttttcacatttttctgaattcctgccaaatttctgttcttttattttaattcaacaaatcctatatttaatttcaactataaagatgagtatttattggacttttgaaggcctgactgaattcaatcgtgtcccgaatagaaatgttgtataaacgtactttttgttcatagaaaaaaactatgtgtttttgattggctcctgctcccgtgcctggctttccagagtattttagcagagtatttttatttcaatgctgttgacaatttctttttcaggctatagaataagaatttaatgctaaaatgccatacaggctttctgcggaggataaaaacatgattacattggagcatatctgcaagacataccgggtggccaggaggaattcgggtttgtcggctgcttttgcttccttgttccacagggaatatgaaaccatccacgcgctggaggatatctcctttcatatccgtgagggggaaatcgtgggttatataggccctaacggcgcaggaaaaagcagcaccattaaaattatgtccggcatcctggtccccgacagcggccaatgccatatcaacggtatgaatccatggaaacagcggaaggaatatgtaaaggacatcggggtggtgttcggacagcgctcccagctgtggtgggacgtgcctgtggcagattcctttgagcttttaaaggacatataccgcctctcagaccagtcctaccaccggaatctgagttatctgattcagcttctggacattggaaccatcataaggacgccggtccgccagctttcccttgggcagcgaatgcggtgcgaacttgctgcctccctccttcactcgccgcgaatcctctttctagacgagcccaccatagggctggatgccgtctcaaaagttgcggtccgcaatattatccgggaaatcaacagggaccagggcaccaccattatccttaccacccatgacacgcaggatatagaggcgttgacaaacaggattcttctcataggaaaaggccgccttctattggacggcgaccttcagatgttgaaaaaacattattcttctgccaaacatatttccattgattatacaccggcccccctatgtggcagggcttccgacttactggacatccttgaaaacgggttatccgttatcaaggatatacccggccatctggaagtcctggccgatacaactaccgtcagcgtgtcccaggtcatttccatcctcaattcccggctggaaatcaatgacctgtcaatcacaggcaccaccatggatgagatggttgtttccctctaccaggagtattcaatatgaaaaaatatgcttcctttttcaaaatacgtttcatacagggactccagtaccggacagctgcctatgcaggcattctgacacaattcatgtggggagccatggaaatattgctcttttctgccttctaccgctctgagccggaagcgtttcccatgggtttttcccagcttgcatcctattattggcttcaacaggcgttcctggccctgttcatgacctggctcatggaggaagagatatttcaggccatctccaacggcacagtggcatatgaactctgccgcccggtggacatctactccatgtggttcgtcaaaagccttgccaacagggcttccaaagcagtgttaagatgcatgcccattctcttgacagccctgctccttccaaagccatacgggctggctctgccgccagacgtcaaaactgctgtcctgtttcttttatccatgatactgggattccttgtggtagtggcattttccatgctgatatatattgcaacgtttttcaccctatccccccttggaatcagggtcatatccctgtcccttgtggaattcatgtccggcggaatcattccccttccctttcttcccggcaggatacgcggcatcatggagctgcttccctttgcatccatgcagaacgctccttaccggatttattcggcaaacattgctggtgcagcggctgtaagcactctgtcccttcagctattttgggtcattgccctgacggtcctgggccattatctgatgtcactcgctttgaaacacgcagtcatacagggaggttgattatgttacgcttatattgccgctatttctccatacagctgataagtgctcttgaatacaaagtttccttcctcctcacggcccttggacagttttttgtttcctttgctggttttctgagcgtgttctttatgtttcagcaatttcatacagtggatggcttcacctaccagcaggttcttttgtgtttttccgttgtcctgtccgccttctcaatagcggaattatttgcagcaggctttaaagggttcagccatgtggtttccaatggtgaatttgaccggattatgctccggcccgctggtaccctttttcagacctttgcctccaaaattgaattttccagcgtgggacgcctgttgcaggcagtcgttattcttgcttatgccatatggtctagcggtatccgctggaccatacagggagttcttcttctgcttttcatgattctgtgcggtatttttctattcatgggattatacatcatctatgccacactctgcttttttaccatagaggggctggagttcatgaacatcttcacggacggcggaagagaattcggacgatatcctgccggcatctacggaagttccatattaaaattcctcaccttcatcgtccctctggcctgctttcaatactatcccctgcttattcttttgggaaaaagcagccggaagctctatgctgccgctcccatcgtatgccttatattcttcgccctctgctgcatattctggagggccggagtaagcagatataagtcggcaggttcataataagccgtcaggaatatacctgccggctgtgcctcctcctaccctccttaccaaacttatcagctaccgccctcgcaaggtgtgcaaacaagtaacagcttccacgtcctttattatactttcttctctgttctaaagttaaattggtcccttcctggcggcccatcctgccccagggggcggcccacatcataaccggacttcccccctggcgtgacatttgtatttatttcaaaaggcggtacagatttgagcttcttcctccgttgtcccgcaaccttgtctccttttgtataaagccagcttttactaaatcatcaattccacgtttcacagtattcctcgataacacaagttcttttgatatggtactgatagagggataacacgtaccattcttatcggtccggtctttcaggtacatatacacactgatggcacggtgcggtaatcccgactgatatagtttacggaaatatcccattcctcacctccctctaatccacgcggaccggcagctttcctccaatcgtccccggcctcccatgttcttttttaacaagcatacgctctgaacatcttgtttctatttcactcataacctccatcgccgagaggttaactgccagctgccggttcataatctccatctccagttccagtttgtccgcatagcttaccttcctggcggcccgttcctgcaattcataaggttcttcaaatgtaatcccccatttcaggaacagtttcagcgttgtctgcatcggatgtgccccagtcttcgtaacgataaatgttccctttttcagtgccttgatttcatccggtgtcatgagcggacgtgcgatcatctgcaggctctgggacggatcattccttcctctgctgacatatccggacaatacggtcctgtttcccatatgttttgacagcacttccgctgactcggagtttggtgcaaacccgccaaaaatgccatcctgacagttatcagtaatgatttcactcccctctttcccataatttttctggagctgcgcaaaactctggataatggctacaatggaacaccgcctggaccgaacggcgctgaatgccatctccagtgattcgattttgggtatggtccctatctcatccagatagaacatcacacggtttttaagcttccctccctgttcatccgcgaccgccaggagctccctgtatagctgctggacaatcagcgacgccataaaatacttggtcgcgtcttcttccggaaggacaacaaagatcgcagatttcgtattgcagaaacgttccgcatcaatcactgtatcaaagcacaggatctgctccagttctgaatccaggaaagcgttaagacgggataacgcggtggacataacggaagccatggcctggtccccggtattgagggcggatcccgcaaaccattttgctttgtggtccgggggcagcttatccatcagcagttggaactgattctttccttttacgccacttggcgccagtaaatcctgaattagtttgaatactgagatgatatgccgcttttccggaggacagtattccgcaatcaatagaataaccgcagtcagaagaccttccgccgcatcataaaaataggcattctgtccataagatgccgcgtcccctccactggaattgataatggtctttgaggtgatttttgcgtacttttctgcttttgcttttgcagccagattgctcgtatctttctggtactggtccatatactggttgaccagatgcagcaggttattgccatcacttcttgtgggatttctcaaatcgataacagcagcctcatatccatagtacttctttgctatacctgcataattccgaaacaaatccccctttgtatcggttgccagaaatgacattcctgacgcacaggcatattcaatgttcggatacagaaaatacgctgtctttcctacaccggctgacccaatcatgagcgtgtggacatcatccgtatcaaccagcgcagttactcttttccctttaaagactccccccacaaccagtccctgcgcttccggtaatctgcttcccctgcgccacgcttcagggagatattccacatgcgtaaatgttcttcggatttcctgtttcgttgcaaaacgggccgttccatgctggccgtcccctactgtcttacttttgattccatccaacgtataatggcaggatagcattgcaatcccgctaatcactgcaaacatgaagaatcctatgacaattaacagtgtcacaccagaaccatccatcccgctacacctcctgttcttgaatcccttccacgcaggtaactgtcacattcctatcagactcttgttgctgttctttagttatcttgctgatctggatgtaacatttcatacaggccatgatgaacgttctgaaggagtccgttcctgtttccatatcttctttagtacatttctgcatatccaatggacaaatggattcgaccgtcatttttaattcctctgattttacccgcatccttcctctgtcccggtgtggctgataggatttaaacagttggtttgcaagctgctcttttgtacaggatggttcttcgtttctatggttctccagcagcagatggaatccggaggcagacatatcttccaggcacatgagcatctccgctccatggtcttccccatatgtcacctgccgttccattgccatacttaagtggtgaaaggagtcctgaatctgctttagggcttcctcatctgtacataacttatcttcctgattcttcaaccacaggcatagcttcatacacgttaagagtcctggatgttcccttgcaggcgctggatggattccgtgcatttccttcaagtcctcgttccaatccttattcctggatgacagacgcgacacgtttttatatccctctccctccaggatctccttcagccggtaacatccctcaattccagccgggtcatggtccatacagagaatgacttcctgtaaccagggatgactgtgcagcatctgaagcattgcgtgttcggataatccgtccagacagatataactctgtttcttccattcaaggggatagagtgtcaggaacgacagaagatcaatggctgcctcaaacacgtacagtctcggaccttccccacagtaaccgaatccataggcgggatctgagccctccacattcagccggaagctttctccatttgtgtaggctcctttcatatgcgcatggcgcgccttgccctgattgtcaaagcctacgaacactgcattatgccgtctcatttcttcatagatggctccccgctcaatgaagaacataaggatttcataatcaacgaaacgtgtccgggaaagataagccaggacacgtttctcattcttatatggttccggtagttggaattcctttctgcttttcgccttgaggcatgtactcccgtccccagtttcccggatgaccggctggtagttaccttccagcagacacttcatcgcttcaacatacgtcatgtcatagaattcctgcaggaactggattgttgaacctccgtagttacagctatgccgataccaggtattattacgtaccgtcacgctgtcatgccgtttccaacgccattcacttccggacggttccagttcctccccctggcgtaagagaaattccaccaggtttgctgctcctgcgcgttccttttcttcttctgtgaaaatgacatattccaatcatgatccctcctatccccggattccctgtgctatcttcttttccttaagcttgcgtcctctcttgcggtcaatccattcatgcatcttgttatgatcttcgttttcctgttcattaaacagagcagacagatgatgaaataagcggataactcctgaccggagtcgtatccttccccactcatccttatgttccagaagatatactgcatatggattaccctggtctgcgcaattctgcagccagaagatgccgctctcatcatccctgaccgttggttcaaacaggtatagctttcccagtagatactgtgcgtacgtattcccatgacctgctcccaggttcagccagtaaacggatgctcccagattcttttccatatacaggtcgtcataatacagcttcccaagccggtattccaaataagcagtttcctttacggtttcagcatttaggaaaacgcggaatgctctgttataccatgcctgggatacttccggatccggttcgcatcctctcccataatgcagcatctgtctaaggtcacacattgcaaacgtatttccctgttcagcttcggagtaaatcatctgattggctgttcctacgtccggcttttctccatccgttccatacagaatattcctcgtctgcctgtattcgtccgtccatttggcataaccatcttctataaattccacaatacaggacatatcatcatctgccacaacatcatccgtaaattcagttccatccatgatctccatatcctccgcaatcatcaggctcacatcatccatcggctgctcagaaatacattccccatacgcttcccattccatggcctccctgataatcatatttttgatttgcttaaattccttctgcttggaaagtgggggcggctccggcgtctgatctgaatagatgtgtaaaatctccagtctggattcataccatttttgataacattcagctatagcagggttggtggacaatacattcacaatacggtctacctgctgctttacccttggaggcagataaccatatacttttcttccctttgtctgtttcagatccgctgccaactgtgtcatcaactgctccagtttactgctttcttcccatcttccctgatcctgtccgaataatttcatcagcgggtctgcgctggcccttaccagctcgttcctctgaaccgtctgattctgatacatctcatacatatcctgatggaatatttcttttgcgtacatggcgcgcatctgctcaatccccttttccgtcaggaatcctttaccggggtcgcggctgtacgcaatcatatggacatgtggatgatgtcctgcttgatggaaagccgcataccataccagattctctggtgacatcttcatggcctccgccatctgcatccgcttaccgcgcagcaaagcttcccacctttttacattatcgtaacctaatcgcactgcatcctctctccgtatggaaagtatgaaggtccatacgttcccttcatgtctggcgacttcttcctgtactcgtgacagtatgaccggcacaccggcatcggtaaacagtccatgtgtcccccttttctctaccccgggacggctggctatataatccacataattttccttctttgctaccaggtccatattctgctcaatggaaatagcaatgaacgccgatgcgttacccatggtaggattcgcctgataatcacgatattcataagactcctgcgtatcaggaagggcccggagtaattcatcgatcagttgtttttgtctggcggttgccggcagatggtcgtgggtatcccttgccatctccacaccttcccgtgtggcaatgtaacggaccagatgcgccagatgtgctttctcatgcttcaggtaacggcatttcaatatgattctaggcatccaatcacccctgttccagaagtatcccatgccatgtacaagttctattttcctttctgatacgccataacagattcaagattcaccgaaccattcgtatgcttcacatcctggatgcactttcccctcagtttttccaaaatctcctcccccacatcactctgggccgcatacagattcatgagcatggataactccactgcaagtttgaataacaacctggatgtccggttctcagacgcttccacgataccggacatggccgaggtaagaataaccggcagataggggctgctttccttcgataagagatatccgttataaaatgacactgcattttcaatgtattcgctccggctcttacagttccccaagtccaggcactcatccatccgcttcagggtcttcggatataaccagaccggaattcgtttcttcgtgtcgtcctccaaacactcacctccattccaaaatatccccttcagagctttcgtttcacccccttcatttacaaacaagagctgaagaaaatggtttttaatcaaaaaagaccgccacctaatgtgacagcctaaactgtgagcatataaacatttccatttcacctatgcatagagcagacggcctttcggctctggtatctcacgccctatggctcttgccgtttcaatccactcatcaatgatggtttcaacattctccagcgcttccaccggtgtagccccatccgccatgcacccggagagctctggtacatcgacaatccatttctgatcttcctcggaccagaacacaatgcgctcatatctatgcatccttacacctccaacttcagcaaatagttacctatcatttgtcggcatggaactctccttccacttcctgtcattaaattataacatcatacttttttgattacaagccacgattgatcccatccagtatctacataccttgtcttcataattcaattctaaatcacattcttttggattcataatccatatatcatcttcatcaaacgtattccatcctttaccccttcctcatatagatagagctggcattcccagttctcttccagcatatcatcaatgcagtcctcaatcccatcacgttgttccccgctaatctgtttaagccacccatccaaacgctcattcaccttttgctggatgatacgttcttccggtgtcttgttttcctgccattgactgtccagtatttctaccctgaaggccagaatctcatctttggttttacctgttttctgtttcatcggtacctctccttttcatttgacaccacaataccgattatactgataaaagtccatatccatatgttataaaaaacaagggatatatctgacagaaccacctaaagggtgtacctaaaacatgggcaggaatcctggattcccgctatttttcatgtattccgaccacctggcaggtgaccagaactccaaaccggtgcaccttggcggatgcggaaaacgcccgcattgcgggcgtttgtgactgggaggagcgcccttgggtgcacctccctttaacctgcacacaaatcgaacgccggaattacctctgaagtctgcatgctgatggtccatgatatccctgtctctgtacttgattttacgctgttttctcaaatccgcccaaattccgtcgctttttcctgacatgcccggtactcccactctcctctgtaaaagcccacacgctggcttaccgtgcgtcacaggcctggtttatccgtacgctgtcttacgaattctccgtgctccatgttccttcccctgtttccagtattccctcatttgaccggttggcagtgttccgccgttcctggctcctcatgccagtcctcccttcacatgtttcccggctttcaatatattccctgacggccggcggcacatatttttcatataatttttgcagggtatgcagaagttccacctccagatccacctctttctttatcatatacttttccaatgccgacagtttctcttcatcatatttcagttggatgcttgcctttttcaaaataaacctccctctttcaataaatacttcttgacttaactcaaaaaatccatccgtcccacatccggtccgccatttctatcagcgtccatttcgatttcctcgcctgcctgatggatggacaactcctgtttctggacatcataatagtagacgtggtctgataggacttcctcttctcccacctcattttggttcacgaatcggactatatcttctaaaccatcgtatattccaacatcaggtataacaagccattcatgaatggatgatggcagaaggaaaaagtttcctcccttggcggcagcaagctccttcactgcttccggatataggatgcaggaagcaccaaataatccatcctgtgatgtcaaaacgctacaatctaaaaacgaatccaaaccatactcttcaggagtttcttccattcccaggctttcgtttaatccatgaatgacatcctctaggttcccgatgacgtatggggcattttctctacgattatccatggccatctgaaaaagctcatcttcatggattcccattccggcaatcgtatggttggtcagtgttgcaccgattatcccctctcccgtatcctgaatgatatatttataaatgactgccaggtcagcaaccatccgatgtggtacatgggataggagttcccgattccggtccgcattgatcaattccatacggatattctttaagattctgtcctttgtaaaataagaaccattcagttggattcccaagttttcctcctcaactgttttcattagctggtcaataatctcgtccatcttcttttttccttcactaaaatcagcataaaaggagttcattacaatgcctggttgttgtagctggcctggcttttttacgacaattgaactactattttcccggttcaccctctcccggttcgtaattgtcaccgaataatcctgtcccatctccttatatctttcttccattctcctggctactgttgatatgaattcctgaaaaaccatgttagttacccctccttccacaggaatatcctggtatcattctgccgcatcttacatccccatctgcatgccagggctttcttcctcctgtacgtcttcatctaacttgggcgcatctggtttctgtacaaccgtctgaccgttttggcgttcctgccgtttattccgttttgcctcttttactgtttcctttgttcctggtgtgttttccttccctgcttcctgattttcctctgtttcagttgcaagctcgcctgtcatctggaactgaatgaagtccctggtctgcttcggtacggtccggttatacagtctgtccagctgttcttctaacaatggctccagattctgctgctcacgatttaagaaatataacaatacattcagtttttcctccgggaatccaattgtgatgttcttctttgccatggtcatatcctccttgcatttctatattggtttgtgttcgtttctatgattctcctgttcactttttccggctgtactaagcagagccggacgtccatataaaacctgtttgtctgcatcgaacaagttcctgtaaactactttgccacgtgaggaggatgcatcgacgaccattccgttacccgcatacattcccacatgggtgatgttcatgtatcttccattcggtttatgggaccagaatattaggtcccccggtacaagactggcccttgtcaccaccagtccacgctccacacagtactgcgcctgctccgctgccgtgcctggaagatagacccccagctgccggtaggcccatagggtaagataactgcagtccgtatagtccccctgtccgcgctttgcttgggaatatggatctcccagtcgggtcatggcaagctgcacggccagacttccggcctccccctccggcagatcactacagatagcctcgtaagcttcaggcgacaaggtcccactccaatcagaccattccacaaatccatccccctccgtgggtgcgcctaccccatacaccatccggtaatatatttcaattgcattggcctggtctatgtcatttactgcctggaggcgtgaacggatgttgctgtaaatctctgtctggctggtaagcggaaccgctaccagataggtttcctctgttgtattcccatcatcatccgtctcttcccttgtccgttcttcatatttcacaaagcagtccacgaattcctgtatcacggataatgaaacagggaggccctcataatcataaaaaagggaatagaagatagactttaccatcattccatctatctctccttcctcaatcattccggtgacttcgtctattacatttcctatccggttgaagctgttctgcatccctacaatgaatgcccggtattcctccggtgtcttttccggtaactttccattctcgaatacggtccttaccgcattctggttatgttcagtcatcccggaaagcatacccattatgagtagaataaccacgaggacaggggatagaatgagcccaaatatggtcgccatccgtttcctatgtgattcatcggctgccgccaggatggatgcctttgcgatggctgccagcacaggtgctgccatactgacttacctccttcctcatcatctgagggagtccatccctgtcatcccatcctgctgtgcatcctcctgcatggccaaccgtactgaatcattgacagcagcctccaggaccactggggcaaaccctgcattccgataaccttcccggatgatattcaggtaccgggatgatggtcggccaaaggattggcccggagtcatgacatataccatggcctccatctgctctcttcccatagatacctccacctgtttcttctcatataggtggggatagccctcatatcggtccagtgccaactcgtcatccccctgaatcttccatatcatgacaggtacacagctgccctgtttaggctcgatggttgcgaacgcattttcccgacggcctctgaagagcagctcataatccatcagttccgccagcccaacaaccctggcggtgggacatcggcgtctcatctgtgtcaggctcaggttagagccatatgctacatataactttccctcttccattttttcctccattccggttttcgtcataggattcgatacgtctcttccttccaagttttcctttccttcctgattcgcgttctcctccatttcacgtctggcccgcagacgctccttctgccgctctgcctgagctgggtccttccacgcgatacagccgtccaaatgctcaagcagatgctttctggtgttggcgaactcctcccctatcaatcccaggcgaagcagccaggtacggaaggtatatttttcatttgtgcttgtggtcttccttctgctggcacatttctggatgagcgcctgatagctaatggccaggcatagatggatatatgcctttacttttccggcgtgggtcgtggaattaaacagtctaaactcaatcgttcccttttggaatacggagtgcagattcaggcaatggtaacgtgtcttatcgtaatgcttgcttctcctgcttcttcccccataccaaatcaagcttacctcatccatatttctcggcttcttccggttcatctcatctaaaaaagtctcatccacaggtcggcagtattggtgtttccgtgccacctcaacctgcaatgccttataaattaagtcctccttgctggccatgatgttcgtgatattcctcaaagtccgtgcattgtgaggggtggcattcacatggatatgaataccgcaggacttattagcgatggccccaccgtgtcgaagttggcggacaatctcctgtatatcaggaatatccgggtatctgcagatgggacttaccacctccaccttgtattcgtcattggcaattccacttttgcattctacttttatactattatctaacacaacacgccactgacgcccttctctatccggtatctcatagacgtaataaaaaccgcctatataaactggcgtggttcccatatagtctccaatgatgtcagccgccgccctgcgtgtaagcccggtcaattctatctcaatgccgaagcgctgctctcgcatccccggtacctgttcgttttcctgctgctttgtcatcgccctcccgcctttccgaacagtctggccttataaggtggtgcctggaccatcaggttataacgttcattcccgcatttataaagacatacgcccctctgaggatactgaatcaagttgtattcactcttttctaactggagggtatccatatagaaacctgcatccacggcccctgcgttgaacaggaagctgtgtgtcgggatggcgaaaagcggcttggtatattcggcaattcccggcaagttgtagtcttccaggttctgacttgacaggataacagcgctgtccttcttacggacccgtttcataaaatttctgacgtactcgaccgccgtcaggttgctgaggaacagatagaactcatcaatgctggcagccgtcctgccgttggtcaggagcgcgtcactcatataggacagaatattgaacagcattgcattgcggatgttcttgctggcctgcaatagtcccttgacaccgaacacgatgaaatggttatccgtaatattggtatgcccatcaaaaaaaggagcctccgctcccctgcacatcgagtgaagccccagaagaatttcctgaaggagttctgctgtgaatagctggcgcctggtatcatcaaatccctggtattccccctcaatcagctggtataaatcagaaagaatggggtaatccgtggggtttagtctcttgaaatcagtcctgtccgtaaaaccaaaccgttcatacaatctcccaaccatgatttcaatggcgtcaatatgctggtctgtaaaatccttataggaccggaagaaatccttcaggaatgaaatgtgctgactcaatctgctggtctggcggaatgccatgggagctcctgtgtcatccgggcttccatcctcgtcccagcaccgtatctgcagcagattgattttgtactcgcctgtcatgaggtcaatgtaacagccgcccaggttttccgccaaatcctggtactctccttccggatccaggcatatgacatccattcccgcttcacgcatgatgcacagaatcagttttaacagatacgattttccctgaccgctgtttcccagaataaggatgttggcattggtcttatcctccgcacgccggttaaagtccacgatgatgttactcccaaacttatccctgcccaggtagaatccattcggatccgtcttcccggaataatggaatggatacaggtttgcaacactgctggccgggagcacccgttcatactgttccctgaacacgttccacccggatggcatcacactgaggaatccctgcttctgtctcatgagcagacggtccacgttcaacttggaacgcacaagttctgtcaggacttccgtctgtagcagcttaagctgttccggatccgctgccgtcagttcaatatatacagctgtatgcagaagcggctctttattccggtgcatctgtgaaacaatgtcagccacatcctgcaggttattgcctgctgtgatggtatcctgaaggttctccgtactcccctgccgcatccggttcttattggcagcattgctgatgattttccgttcttctgccggggaaacctgccgggtgtagatgcgcagggtcactccatctttctctcccaggttccgtaggatggcctgctcctcagtactggtcgggtactccctgagtgcccatacacaccggtaggtgttcccgcacacataatggtctatctcaaattggatgatggaagggctgaccatgtctataaaatccttcacatatacctcatcatccctccgattcattctttttcttccgattactgttccctcctccccatcaatggtcatggaatatgacccatcgctcaccatctgattcctcgaaccgctccgtggtcacgttctgttcaaaatacacagccagaaccctgcggatgtcatctccatttgcccttcttgtggtgaatccctggtcattcagggtcttttcaattcgcttcagatacggggacacttccttctcttcctctcccggaagccgcacaacaagaatgaactcccgtgccgtagccatctgcacctggatctggtccaggaacttcaggtccgcctcaagaagttttcggatggcagaattttcttcctcctctacccggtcctgaataaatttcttattatcctcaaagttctctttgctgttcaggcatagcatctcaagctctgccattccttttaggaccgtcatgagaccatatattctggcagccaggcttgactccgacaggacagacaggttacttggatgaatcaggaaaaataccagctcaccatgttccattgtccgcaggctatagtctgttatctcctggataccaattagctgccgtgtcccttccttcttctgtcccgtctttttatcctttttttccttcttcatcttcttctccattcataggtctgctgccgggtcacaaaaaaggcacatgcatataggataaaatcccggatgcgtgtgccatcaaactggatggaaaggaaaccatatacggttgtcaataccataggtaccaggatatcactgaccgaaaaacaggcgatggagaacacggctcctatacctataaatccgatatcccttaaatcccacagccacaaggtggcccttgcccttagatgatccggatataaataggtcatctcatttacctcctccctccattcatcctatctccattcttatcaacatttcctgcctttcatttaccgatgcagtaatttcatcccgtcccacgaacctcacctccttcccaatcccattggcaaaggccagttcctgcttcattcctgcggatatatgctccccacatatccatacacagtcgcagacttccatcagccttaatcccatttctattcccagtccacgttgtgccggatctgtatcgtccaggaacgcaggatacatcatatgtggaatcacaggtatgccgccctgcatcatacaatatcggcctgcctgccctgcaaaggtaaggttagcctcaacatcccccgcataagggcttgctatatacaccagtcctgtcatcattttggtatcagcgtcaccaccgttcttgtaagattaattgcactctgggcagcatagacggagcccatcagattggcccttgtacttgtatccatgccgaactgccccgctatccttggtacctcaccactggccagcataattccaagccccaataaggcatgctctcggatgaccaaaagccctgctgtcagaagggttgcctgcaggaaggctgtgagacacagaccaatcacctgtttgcaccagttcatgaaaccatccacatatcccctgggaacggaaaacatatataaactccctaccgtaatctgagtgagcaggattccccctcgtttaaggttggcaaagaacaccttaatgattgcataccccatcatgatgataaggaagatggtaaagattccgtttcccgccgggtccagtccaccatataggaaggacaggtctgcctccttcaatgaacctgcggatgacaggttatccatgatgcctgcggcaagttccgtgactccaacaccctgtcctgatatggcagcacttacctgtacctgaagtgtgatagccagccggtacaactccaccggcacactggaaaataatcctactgccataaagcctttgattgcattgagagctgtatccttcacacttccccgtccggtctgatattcaatggcacattcaaataccgccaccaccagcccggtcacatataacgcccaggcaagatagacaaaaaaatggacaatcccctgaacccataccagatcaaatatctctgcgcccatgtttcccatcataccaaaaaacgaactcagaaagcctatcagctgtccataaaaccattcaatgatatcctcaaataccgtatctacgacaaaatcccaaatgaacaactcgtctgcccacacctttccatccggaaggccggattatcaacacatctgctggccttgtattggttcttggaatgtctccacataggccctaaccgcatcagcaagcttttggtaatcatccttgttcggctggtacacataccactcggttttttcccggtacctccatatatgggggctaatcccttccccaaagttaggatttcctgtcttttttattccccacaggtcatgaaaatacagcatcatgttgtctatctcaccctcatttcggttcagcagggtgacttttaatgcttcatattggtctgcaacaccacatgtcgtaaaacgaatttttatccgtatattatggtccagtcttccatagcaggcattcccaataaaacgtttgtccataaaagcagtatcatctgcaaagagttttttaagttcctgttcaaaaaaagtcataccatcctccatttaatcttaaatacagttgcgtattcacgctgccctatgatacattctgtcctacagaaacacactcctgttcctttatattgaccagttcaacctggctgtccaccaataaaagaagctcatcaaggcgtcctatcaggtctgtcatatgttcctgccagcctgttcaattctcttccttgaaccaaccgccccacttcctattttgtgattccatttgtgcgttcctccttctatgcctaagggtgtctgctatataattccgaacccattggatggattctttggttgccgtgaatgaagtgaccatactgtatttattttgcctcatgtaaggccccacatcatggtccaggctttcgtgatcctgttcgagaaacttcaccataatttcagccagtgccattggacttgtatggggctgtccatccgtgacctccggtggccggttccattcgtcctgcaataaggactggatgattgcactgagttccagcttcccatcctttggcaggtgttcccgtataaactctactgcatccaatccgtcatctgattgcatggctgtgattccccagcatcctatgtgtgccctccttttacatctctaatttaatttcatgccaattcagattggaataaatccaagtacaatgggattaaatgctctataatattttttcaaatcctgaaaggttgagttctggcaaataatcctgttccaacatactgagataaaaaattgcaagccttgaagtatagtgttctgaagcacagtatatattatgggtgagctttttaagcagatttgcttcaatgcagacactgcacgcagaaaacttcttcattgaaccatccgtttttatgatataccaatattcttcatcaatgagaaactcaaaaacatagaaagccctgtatgtgttgtttgtaaccgcagcactaaaggctgctgactgaagtgccatctcacagcacttatttatggcttcctgctcatctaactcaaattcttttgctattaattcgtcactataaaataaagcatgttagaatcactacatgtccagacaacatccttatggcagaatccatttttcaatatgctgcaataggcttctgtcgttgtgccatgatacagtcttatcatctttttacatccccaaaatctgccatatataagtgggcgctgtcagagtaaataccagacatgcgaacagtatcgctggcccgctccattcaaattggccatgttttcggaaatcaaagtacgcagttcccagttttccaaaaaagaatacagctaataccaggtcgattgcagggaacacgacatggtcaacgactgcccgaatctgtatcagtgcagttttccaggtctcctctatcgccccggatacattcccatccgcataagatatcatgcagaacagaaaagacagcagccatgaggtcatcactactgtcccaaaacgcttcttccatttcataagcttcctccaatataaaattgtctaatcacgatacacagtgagtaatatgagtaacattaccttttacccttccccattcttactgcgcaggataatcacgtctaataatttgtagttcaggaccggctcatagcccagatgtcactcgcagctactatccccgttacaaaacaggtgaaactaatatacctgttcaggtacttatttgccctgcatctagggactaactggtccgatatgccaatccaaccataaatccccctgtatatccacatcgtctgaaaggtcaagggataacatgcctttgggtgtccagcagtccaaaagccaggtatacgccgtatatgttccatctggcatccatatcggtgtaaagtgggtacgtctgctaaatgttgaatactcattttccttaaattcaaaccgggcatggtaatcaccgctgatcctctccaacaatctccaatatgtctggtaatgaaattccgggaaataagtcacagcattctgtgcccctgtgactgcactggatagggtggtacttacatcagctgtaacttcctggttgattccatacccgcttttaattatatcaccagttgctgtgggatttttctcatccgggaatatatccatccctcctgacagactggcctgataccaatcctggtcaaattcccaccagccctcatcttcccaatatccatcctcatcttcccctccatcatggtacacccaatattcatgccaccaaggcctccatatactccacctggcttcctttatatgactgttggatggaagggaggttggcttcacatatgaatcattcctatcatctgcaaccggattcgggggaggattcttgtccaggtctactaccttaacatggatagttcccttgcttggataacctcctccacctccactaacttggattgtgatatcctgaggtgtttccggtgtggtccaccgaatccatgccagctgctcacttccttctggatagtacacttgatttacagtgtagttcttaccttttatattaaatcgtacacttgcagggtaatccggatcggactggccacctctcacagtaacagacgtaatgacttgtgtattgacacggtaaacataatcataggtgactacttcgccttgttccggctcatgttccttaaaatggatgatacctaatcccaaagaggatatgatttggtcctcggtaactaattggtctcttggtcccgaccatgccggataacctaaatcgggaatctccaagaacatagaaagcggtacgttcttaaataaaacattaggcagcatatcccggatgttggttcccatccttgaataatatgctgcctcggttgctgtcatagccatgcggattccattgtaggtcacataagctactggctctaataagattttatattcaccgtttgttaaggtttcaaatggaatgcctgtactctcagcgattagctttaccatatattcagagcagaagtatcgctttatttcttcaatactgctatgaccgctggcactggtaacaattttggggatctttgaaaccggttgagcatattgatacggaacaacgctggccgttaattttgctcctgtcctatactctattttacttacccgtccaaaatgcatttgtactttaggtatcttatttgtataatcaataggcgttgccacaatagtctgatcagaaatgcgtattacagataccctcaccccttcatctcccactgaccacttattattctggctcgtaccttgcgacatacctccaccaccgctatctatattaccatcgccaatagcataggcattactagaaattaataggattaatacaaatacaataatgcattttatatatctcgccatttatctccttcacacaaaaagccgttgaagccaacgaccttttgattatgatatcaatttagtattgtcttgctacagtattcctctcaatccattatacctacctgtttatttatatctccatcagaatcaacctgggttcctatctcgccagtatcatccatccagccaaacccaggcacatatatcttcccttcctgaggcgcagattccgttgcttcggtcggagcttcggttgggggctctgttggttgttctaccggctgtggctccgtaaccaccggcggttctgtttccgggattggttgctgttctgcaaccactggattggttggtgtcacagtctctccatttggtttctttgccgggtcatgtctgtcctcatcctttggttttgcaggtttcgtcacctctggctggatttgttggactgtttcatcggtttggtctttcgtaggcgctgccgttgtctctgctttcgtctccaccttgaccgtttcccggactgcctcactactctctatcataggttcggcaacagtagtctggtctgcctgcgtggtttcctgaacagctgtcgccggctcacttttaaactggcccgcaatcaggatcaccaaaatcatgcacacaatcacagcgcccccaattatcatccatttcttctgcttgtcatccaatttcatatacatcccctcctcttccctgcatctaatttcaacctaccataataacgttctaaagtccagatttattctccattttaaggaaatataatatgattattatacaaacatatcgccagatatttttttaactatcccatcaaaacacgggagtataggctgcctgtactttcatacggatctgcatgtccggcaggcggctcccgccgaaacggaccggcacccggagtagaaacgtggcgtctgccaggaagcgtttgctgctgtccgatgttaaaggaacattctgtatagttacatccaggtccgaaatccggtactcttcctttcggcctccgtccaccagtttcacatgataacttccataatcctccattcccagaaggttatccaggaatccatatacgtccccatagtccagactttcatcccagcctcccccggacggataataaccgccggagtacccttcacgcacaccatggtatacatcatcatagttatcattgaccgtggaaaggatggcttcctgtactgcatccctgactcccgctgcaatgaggttcagcctggcatattctgatataccacaaaagaggaacagcaccaccagggcagatgcaacggccaaagggatgccattaccttcctgctctgatatcgcctttctccatcctgctatttccagtatacttccccctttccctgtgctttggcatggagggtgacaggataggtaccaaagccgccaaacaggccaatatccatctgcatggtcagggtcacctccacctcctcattcaactggaacggtccgtcctccgaccattccacctccggcgtgagtcctgtcttttcccgaaggacggcctctcttctgcttgtctccggcccaatccggcccgccatctctgcttccctgcacagttcctgcgcaaacgtgtcaagctgattcttggctacatatactggaagcacatttacgaccagtcccagcatcaggaatacgcacagaaccaggacacacacatcgatatatccctcccccttctcatttcggatgatatccaccagctctccccctttcttaaaacatgtttcccagtgacttgaggatttcgtatccaatgatggccagatatgtcatgagaaaacacaacagcataagaaatgagaagatacgtattttcggtggaatcttctgggcctctttctttagccgctgcagttccatctgcttgaaatcatggcttaacagctgaaaataagctgcgctgtcatctccccttaacacaccgataagtcctcttaccacatctgaaagcataggagaattcatacgggcctcaaaccgggtcagcgctgcctcataacttccggaacgcatgtctgcagtcaggatatcaagctctgcccggagggtatcgctggtattctttttgaagttctccaggatggacaggacatccctgctgttcttcagatcctgctcaatggttgctacgaaccgtggcaattcctgctccaccctatcccgtttttccttcaatctttcttccggccttctggattctctgaaataaacagccaccgctgcaaaaaccggtactggtgtcgcaagaggcaggaacagtaaacagggcagaatggggattgctgtcacacctgccttgactatacaggaggcggcatgaacctccggggtcatccccatcccggcggctttcaggatattgcccatcctccgctttctgtactcatccaaagtgatatgtcttgccaaaaggaccgacaaatggtccatcctgtcctccaggaatccggtaaatttctgtttcccgctcccacgttccgcaatcgccctggctgctcccatgctgggcagtcttaacactcccgcagccaggaaatagaagccgaatacaagagacaggccaaatacaaacagtaataaaatcatgttacctcctatattcaatcggcttagttagacgtatgacggctgccgtagacacaaagatgacagcagccgtgatggccagtatggcctgtccgaacaaggtgtgcatcaatgtctggtaccagtcatgatttaaagcatacataagcggaatattcccgacgacgaggattaccatggtgataaattctttccttggttcaaacaccaggttttccagctccccattcacgacacgcatgtcggacagcttattcacgatgggcgtaagcgtagatttcagggaacggtcatactggcaatcaccgattgcatccacccactcttcgaacacatcattgcgtatcttcttccgcaactccttcagcgccgcctccatatccggattaatgaccttcatcctcaccagaaaatcttgaaatgcactgctgaccggcgggttcaggtagtggatattctcattgactgcggtaagaatatcctcgctgcgcagataggcggttgtaatgatgcttagggctgtctccaactctgatgcgatggctttcttgtaatggtgttccatgagccggatataccagaagggaaggaacaggaagccggttgccaggataggaatcaggaacacatttcccaacataacggccaggattcctcccgtcatgaacaggccgagggctaccgcacagattaaggagattctgtctcctttcccggttagggccagtacctcctgacatagttctacctcccgttgcaggatggatggcttttttcttttctgtgttttttgtatctctgctttgatgctatccggtgattttaggaaatgccggaagaccccatccgtaaattccatgggtgtcagccgcaaaatcaggaaaaagccagtcaccattccagcgcaggccagtatgtttaccatcttcatgcctcttctccttcccatcgcacaagctgctccttcggcattccattttccaggaagcgcttcttcaggctttctgatatgccctgtacccgttcatgctcgccatggatgatgaagcggtcgccttccagccggttttccactatgttgtaatggtatagggttctgtagttccggttgccgtctggaaggatctcacattccatgatttccatgaccttacgtttccggtcctctaactgcttggaaaacacaatgatggggaatgcttccgttactaaggacatcagagtctcatctgagatatcatatttgcgcttgcacagcgtcaccatcctccggtaggttgactcgcagctgttggaatgaatggtcgtaagcacagtgtgaccggtcctggccgcctcctgtgcagagtaagcctctgaactgcgcatctcacctacacatacaatatccggattaaatcgaagggccatgtcaagaaggtcatcctggtctacggtctgtttctcattctcggaatccctggtcagtgtgtgaataacacggttcatgaccttcccttccttcactcgtacaaggtccagctcccttgaaccattctcaattgtaaatattcgcttgctgtccggaaccgtggtaaggacccagccggccaatgtggtctttccggagctagtagcccctgccacacacacggagattccataacggatacattctgccaaaaagtcaagcatttctccggttgcagttccccctttcacgaaatccgcctgggtcatactctgcggattgacaatacggatactggcgcagattcctacatcctcatccacaaggggagtcttaagaacagcaatacgaatgtttttcgatagatgtcccaacaccgcagggcttgcattgtcaaggaccatcccgcttacatgcagcatgcgccggatgacattgatggcatgttccgggctgtcaaaatgttcctccagcttctcattccttccattgctgtactgtacctcaatatcattccagctgtttacatccacttcctcaatgccggtaccaaagatatatttggttaagaatgagaactctgccatctcagtatacagtgtatccaccagctgaaccatggtcattccctgaacagcaatccggtaattctgaatgtattttgtgatataacgcttgatctgggctttcacatccgcgtcatcatggcctgtcagcagagtggcatacttactggacacgtattcctgtacctcctgcagcacctgagtgaattctcgtccttccctggcagaaaaaaacaggtcctgattcctgggtcccccatttccaggtacaaatcccacagtgatgtcctcttcccattcttcctcctgtacttccattccatcatccttccggtcagtcggcatccccggccttttattctctttttggggatgatttaatgtccctgtggcagatattctgttgtggtccggttgatgagactctacagcctgtactcccctttctaccatctgcagctccattaccacaggctttggctccgcggccttttctgtctgaaagaacagtgactcacctcgtttctctcctaacatccaaatacctccctggtaatctgttctatttccttgcggaatccccggctgtcctttaaagacagctccttgaacaggttcccggccagcacctgttcctccacttcagcagagtgaggaatcctgaatgttacatttcctaacacccgttccacatgttcactcgcctcatttggccggatgttgctggctacccggtactgcttatccgcatcccattcatggtcctgcaggagtgggagctggctggacaggtagctgatagattttaggtcacaccccaccaggcgcagcacggaatctgcctccataagtgcaattgcagacaggatatcattgactatatagctgctgcagtcaatgataacatagggtgtcagttcccgcaggcagtcaatcagttccgtggcctggctggcattatggggcggataggtatattcattctcccctttctgcatccccagaatcatcagatagtccagatgtttgtgcaccacgcagttctgacgtaccagattctgcgtcacatgagtcgcggccaaaatgctccccagcgaatgttcggactctaaatcccccggcggacagatgcagggcagcatgggagctgtcatgtcacataacaggagagacacattccttttccggtccgccaagtatttggccagctttacagccacggttgtctttccgcttccaggactcccccacactgccagtacgcctcccttatcctggtattcctcacagtccctcttctcttccctggaaaaaatgctgtgtttcttgatattaagcattctgttcctcctttgtcccttctgtttctgttatctcttccccttctgtatttttgccgtcctgtgcttgtgtttcccctgctttctcatctgcggcttcttccggaggatacaaacgttccagtaactgctcctgtgccgcaataaattgcccggcagtctcagccttcccccggtacacaagggccgcatgcagatttccttccgtctcaagctctgccaggaccttacactgaatgggggtagccagtaatgtcaaagtcgccggaagggatttttctttctccttatctccggtgtctgtattggcgtccacacccgtactgtctgtcactgcaatgacctggacatactgcagctcctgtggtataacggtttcccccatcttgaggtaatccggtgcaaggatggacacgatatcaccgctccgtatcttaccggataatcccgcagcaaaggatttgacggtcacggatatggcttgtttatttccatccagctgatacaggtaagtgtctgcgcctggtggctgttctgaaatcttggaatgaagaacataatcgcctggcaaaagatcggctgtggcataggcgcctacaacactccctaactccttcattacatccccgggaagattatagccacccacctccaccatctgtacgttatcctttgtgatttcatctccagccttaatggatttctggacccgcacgatttctgtcttttgcgagatggcctgattaaataaaggggtaaccaggaaacagatggccaacgataatacaatacagaggataccaaggaccgtcctgttcttaagcaatttcattgagccctccttattctcccatccgggataatcgtcttacatgatgcttccttctgttccctttcctgacgcttttcaaaaccagaactggtattgaaaatgtaaatcgggtctttttacatatcttcaatttcatatcttcactctctttccgatcattcttgtttctgtgcatgggaggatagcctgcggataagaaatattaccaacatgataataacgagcaacaagatggctgtcagaatggccttaccttgtgctgcttctttgtctcccttctccttttctacctcacttgcactggctttctctgttttcacggattccacttcccagtttgtcacatcagggatggatacagctggcatatcacactccggctgaacctgggtttgccttacatcatcttctgtcttctgctccaataatacaggtaagccagatatttcagctgggatttccattattggtgcttccaaaatagtcagtatagctacatcctgcaacggatggtatggtctatatgccctctttcccgttgcatggctgccgcctgttcctcctcccggacggcgtggtacatacttctcatcatcttccgttccaggaatgcgatccggtccattgagccagagctcatcatcctctgttccgaagattccgtccttaccaggacggatattggtcccttcttgctccttacggttgtcatagcagtcgtcttccgtaccatatattccatcggggccaggtatcaaaagcaggtcatcctcattccctggaatactatccggaccattaaaccatatctcatcatcctccgtccagaattcaccatcaggtcccggacggacattggtagatgagtaaaaatcctggttgtcataccagtcatccccggtcccataaataccatccagtccgggataaatccgtacatcgtcttctgtaccgggagcgccgtcaggcccattggaccatatctcatcatcttccgttccaaaaatcccgtcattccccggcctgcggctggtggatggataggtttcaccgttatccatccagtcatctgcggtaccggggattctatcccatccattggagacggtaatatcatcctgggtttcaaagatgcaatccggtccgggccgtgtattccacccatttccatcatcccggtaatcatcctccgtcccgatggctccatccttgcctggccgtttattcgttccatctcccaggtcccggaataccagggtgaaataagcgtatgcatccatatcccggtctaccgtatactcatatgcgggtacaatcttctgccccggttctggaagtgcctccccatacatgattctttccgttttctcttccccataaggctgggcataccatcccagaaaagcataatcctccaggtcagggaccgggaggattccgatgggtttatcatatgtgaccactttcccatctatatcgcaatgggcattcttggtatggaacataatgcggtactcattggcggaccaatgagcgtgataggtcgtatcctcatgtggtacatcagtttcttccgtaatccgggtccctccgtctggttccgtataaaaacccaggagggtatatcccttccggataaattccggaagcgtcccgagcatccccgtatatagaagccccttctgttcattctgcctcccatccatcccgtccgcaaatgttatgatgtatgtgttcgggagccattgagcatacagtgtgaccgtatcaccatagattttcgtcaggttaagtacggactggccatcctcataagcggcaccaccaccgtccggttggatgttccatccctggaatgtatggtaagccctggtgtactggttgatgaataatgcgactggcgtctgatagacgaacggctgactgttcatgtttccggagcctccattggcatcaaatacgaccgtatacggattgtatttcacatctgtcctggcatcacaccccggacgggtacaccgtttaaagtaggtaccatcattggcacccatgtaataaccgtcactgaacgcatgtcccaggacactggtggattgggtctggaccgaaccacaatcccggcaggtccgtctctgggttccctgcaccgcacaggacggctcggatgcagtggtccatggtccataatcgtgtgccacattgagatgcatggtccagtgagccggtccgtaatagacccggtccccctcattgttcactgtgttccatccgtcggcatgggcatcccagtttcccgccatatcacaggtaacacgcatgagccaggcatattcgtatctggaatagtacgaatcagatggatggtacagttttgcaaagtcactgaatctgcggcctttattatcgttgatgtaacttatatgaaaataggaatgtttgcttgcacccattggcctcaggataaggagctgcccagtctttaagttgaccgtcacctctgtccggttcagggaaccattacttccggaactgacctgaatctgcacgtctgcacacccatttgggccatatgtcttatataggctgctggtaactgctgcggccggaagagacggcaggtaattggcggactgcaccggatatacgtttgggatgcgaattgcatttcgattggcatccggatcccaatcaccctgataatactccgcaccataagcagtccgaaacagactacgtgggccggcatacgctccttggtcttcttttagttcccctgcttctgaatcacattctcctgttttcgtatccttcatgggtgctgcttcagatgcggttgcttccaataccgttacatcggaacacgaagcaccgtttccttccatgttggcatccattgtttcttcattggtatgtgctacttcctcctcctggatcggcatgtctattacaacttcactctgacctgatggtcctacatccccggaaagggactggtctgaagcatatgtcacctgatgggataacatagccatgcttagtaagatgcataacgtctttttattcatatctgacctccgcccattcattctagcagctgcgtcctatcctcctgcacacaccacagccaggcagcccattgttaggaatgggaccatggggtatgacttaggaggctggacgaccttccataaacaccaaaaaagatgtcccatatgatacacaagcagggataccgtccctaataccgccgcctccagtccgccatacacacctaagtgcataccgcatgctgccataaacttgatatcccctccaccgattcctccccagcatactgctgcaaaaagaaaagggatggcgcacagaatccctgccggtgagccgctctggtgccccaacagggaacaggctgcaatacaaagattcagccagtccggtaccatccggtgacgaaggtcggtataggaagcgcccagcataagaccaatccacaaggtcagttcaaggtttctgtacatccttgccttctcacatggacagtcctgccggggctatctgcgggacaggtgattctgccatttgtgccatcttgccctgctgtatcgtaagagcctccttataagcagacgtcagggcttccgtcatctgtgtccggaactctgctgtgattggaaaacagatatccctaaattccccatttccggtacgataggatggcatggacagaaacatgcctttctcaccgttcatcagacgtatattccgtatagccagacactggttcaaattgatggacgctgtggcaagaatgttcccttccatgctgatggaattaatctttacatcaatacccatcttattacctgcgtgtccctctggctgtgttttgggttgtacttgttgtgttttcatttcttaacatgcctccttccttaacctgaatagttgaacatttccgcaaccctctgggtcagggttgggagtaccgtatccgcgaataacttatacagccctgccaacagaagggcaccaatgacaactgccatcagaatcttgatagctgtatcaacaaaattttctgctttttcctcatgtatcaaccggtttactgataacacggtcctgaatgccagcctttccactctttcctttactttcataaaccttcgctcctttctttaacgggtcagtatgataggtctgttgaaccatgacgttctacatcacatcaccatctctggttcatccccttcctcccaatccgtatccatatcatcctctatccgttcccggcccatctcataatccggatccatctgttgttcatacacacaaaggacggattggtcaaactgctcccgtatctcatggctttcaaaaaagcatgcatccttatatcccacatggcagggcatcttggttcttagcatcacgacttctattccgtaatcattttccttcacattccgtatggtacagatacccccaatccgcacttcggctgtcgcaagaatcccatgttccggctggaggtttgtgataacggaccggaacaccggtatggtatcatgtcccgcagtttcctgcacatgctccttttccctcctttcttcctgtcctacgtgtcttcatttcctaaataggttgtctctggcatgcgtcctcacctttcatgtggtcggctccctgggtatccagggattgcccctggatgaacccaatcttctggaatccgtaatggtctacataataaaactcgcttccctgcctgtcatatagttcaatgacatccgagatagaaatggggtgccccgtggaccgctgcgggaactctctctcaaacttggtatagatggtttccaggtcatccgtctcaatctggcagtcatataccacctcataccggctggaatccggcatcccatgacgtgatacctggtcctcgaaatcaagaaaccgctcctccggtggcacctccggcctcagttggtggagcctgcatttcctgattggcttcacctccccggtcaggtccacccgcccatgtacgagacggtcatacactccatcctgccagcatggttccagccccttcttctcctgcaggaacctggtcaggtattcgttcttaaacatcggatcaaggacggcttttccatcttccacatcccctgctatattgccataatacaggatgaggttgttcttaaccgcaatgcctgccatctcctctctcctttccgtttctccgtttcctaagaagacgttccagcttctctcccagaccatcatctgtgcagaactggatgttccctcctctcacgaccagtacgggggttacatgggaatccaggaacacaatcagttcgggcagtgtctcctggtccatgagggcctccagttgttcctcatcgaatggcatccttagcttcacaatcccatccctatctgccatataggcgcatagcagccgttctttggacattcccccatccatatgtcatccctcatctttctgcataagatcagctaattcagccaaaaggctcacacggcttttatccggcatctgacggacagcagcacggacatatgcctctgtggcctccggagactggtcccctgcctcaatcagctccaccttcatcagtccaatccatccacttttatctgcctccagccgtatgatatctcccggatgcattcctgcttcctcacgtacactctttggaagataaatcctcccattaccgtccacgattcggtacgtcctcttcagacctgccatctaatccctccatttccataatgatccgtaccttctcagggttgattccaatttccgaacacagttccagtatttcatgcggtacgataaccttggcccgggccggaagaatggtaatcctcctatcttcgcacacaacctccaggtcctcatccggctggataccggcttcctctaacagttcctccggaaccgtcagatgcgttccatcctcatataaccggtccggtgtaagttcccccacctccaacgggcttacgaacacctccggcccgccgctatcttcttccgccagatatgtgacatagactgttccatctgcatttgtgccaatcgcttccaacacttctgccggtattatcactctcccgtcttcctctggcctcatatttaattcttttaactgcatgttcctccttccttacggataaaatccatatacatccgacagctctatctgttccggcaattcccttctcctacacgctgtatcatagtttgatatgaacacctccgcatactcctccccctggttataccgttgtgccaggttattcagccgtttgaccgtctcaatctgatatccttcatacagttcacggatataggcacagtcgttataggataacagccattttccctgaattcccccaagcacgtcacggagccgcacatggtcatcccggcggaacaccacttcgtaatgtccctctgttttgtaatagggcgggtcacaataaaaaaaggcatcctcccggtcatactgccgtatgagtgcctcaaaatccttgttttccaccacggtcccggctaacctcctgcttccctcccagagcagcccgaatgtcctgcgaatatcgaagggctgactcccataggaagtacaactgcttccatagctatatcggattaactgataaaagcaggcagcccgttttacatcatacatccttgcacgttcctccaggagaggccggatttctccacacgcctctggtgtcagacattgttctgccacatgtccctcatcctgataccatggacctggagccatgaattcctcccgattcagaaatctcttcagataattgaactcctcccttccattcaacggaaagaatcctaattcctgaatcaatgccaggggcctgtcccgcacacaccggaacaggttggtcaggtcagagttataatcattgtatacttccattccgctcggcggctttccgaacagaacccagcctcccccgccaaacacctcaatataacgtccataggataaggggaaccgctggtaaatcagttccctgagggctttctttcctccaatccaactgatgatgctattcaatggggcagcacctccctacaccataccgacctgttccatccgcctcagaccatgttcccgcagaaggcatccggtcaggaggacggcaaacaatccctggtccaccaggctgcggtccgtcaggtccgataccttcacacatccggtccggtaatacaggtccttggccagatggtacaggatgtatcctttgacgttgatgcctccaagctgtatatccggaaagattacctgtgacatagtaatagcatcccgtgccttatcccagagatatccgtcagcggccaacagataaagggcgcaggcataggatgccttttggtccagagcaagaatctgtctatgccccatgagacctctgtatcgttcctcatgttcccggtttcgatagacagggccgtccatacatgactttgtttcctctactcgttctataaactggctgtcgggaatccgaaaccgcagttcctttaccatcttctggtatcctgaaatctttgtgtctctgcaaaaaaaacaggaaatcgccatttcctgtcccttcctatccggaagacagggattcccctcctgcatcaacacttcgaatgcctctaaactgctgcctgataaaaaacgtcctactggcatttcatttacctctctttcctctgtccttacatgttttgcgaacattcgtttttctcattctttgaggaccaccttctttactgcacaggtccctggggtcccatctgactgttctgtcctttttccagtagttgtgccccctggaaaaaataatggaccagacgtctcatatcctcaaaccctcttgtttctggcatgcagaccgtgataaccgctgcatctatgatgcttcgtccgtcccggatcctggaaaattcacggctttccccccagtaaccatctccttctgtattgaattcctcatatcggccatccgcttcaaataaataggtcactgtatcaactccaatctctttctgctccacctcctgtcccttataacaatagccatccatgtaggtgctgatggttcgttccggggccatatagagggtcatggtatccaacatttctcccggcaggccctcaatcggttgttcccgcaggacgacccgtgccacaaaatttttaggcaccttacaatccaccaccagacgttcaagtttttgtccctcaaaacgttcaaaatacatgggatctccgaaccgtatatgcgttggacagtccactacataaatttctttcttcacaaatccctccttcaaggccgcatatattacatccacgcacttccgtcactcccacttctcattctctgccctccacagctccaggtcggacaggctgatttgtccttccgtgttcttatcctccatccaccaggcaaagacatcctctgcatccttccatcgggttgttatcccctgctcctgaatagatgtcatcatcatgccgaatgcccgtaaataggccctcttgtagctgggaaaaatgcggaattcggtccaacggttctttgccgccatggggcagccaatgcacccaacccggtgaaatccccattcatacagcaggtttaccggaatacgctcggactggatatagtcccatatatcccgatccagccagtccacaataggattgcagatccgttttccttttatagtgcatgtctcaaataacatacgctcatcgacattgtcattgttaagaataatcttcttgttcttatctcttgtgtagttctcaaaaacaccgcgattattcctccgtttctgactttccgcccatcgtaccccggtcgttataaaccggtcctgacaggaattttccttcagtatcttatggaaagctttccataaaatttgttatgaaaagaaagtaattatggaaagaaacaggcgaaaacactgctatttcaagatatttcgcctataatctttccataatacatttacttatcctgtcccagactggtcagccaggacatgagatcatcgttcttttgccatgaggtcactttatctgttgaaattcctatgttggctttttcaaacgctgctcgtttcatttcggcatccgctttggcataaatttcggttgtgctgatatcaatgtgtcctagaaagtcacgaatataatgcagatcaacatcagctcttaataagtgcatggcttttgtgtgacgcatgacatgaggcgtcaccatcgcatttgaaatgtttccatcggcctgcagttcattggcatacttttttaagatataagtaactccagggcgggtaagacggtttccctgatgattacagaataaagcctgatctggattcctttggggattcaatccgtgtctttccatataacattttaaaatctctgctgtctggtgcaggataggcacggtcctcgttttccttcctttccctgtcagacggataacacttggtccatcaatcctcacatcacggactgataaatcaatcaattcctgaacccttgcaccggtgtcatacaaaacacatagcagtgctgcatccctccttccatagatggtggcctgatccggcctggccaaaagattttttaatgagtcttccgataaataattcaccacagccttttcatgttttttcatgcgtattgacaggattttctggcattgcaaaagcatatccggtctgtcaagctggagatattgaaaaaaggcatggattgccgccagtctctgattacgggttgaaatggaattacgtctcttgtcctccagccaagccataaattcgttgatggtctggtctgttagcttactcaattgtactttttccggcgagcagttttgttcctcttctaaataggtcaaaagaagacagaacgtatcacgataagaacggattgtattcacacttaagtttctttgacctgccatatagttagtgaaatagtctgccagacttcgggcaaaatcagtcggtttgttcatcagcctccatcctttccggcaacaatccgccaaatgcggcttccattttttccaaaatttcaggatataattcggaagtcagatgaagatattttgaagttcctttgtatgttttgtgtcccatatatgtggataaaatcggcaggacctcagcgggcctcttcccttcttcaagaagtttctggagactgtgtactgcaaatgtatgcctgaggtcatggaggcgcggcccaacatttcgtcctccgtatgaaatgccgctgttccagaggatatcccggaacgttttacggattgtaaaaatgtgataggtaaggccatcaggcgccggaaagaaatacccttccggattaagttcggataatacatgttccttataattcatgcaccgctggcacaaatcctggtttaacggaatcaagcggtccctatagtccttcgcatcgtggataaaaataacgccgtgttcaaaatcaatatcggaaactctcagattcaatgcctctgaaaccctaagtccacagcaataaaggagacggaacagtaaaggaaagattaaatgacggcggactgaaaaacaggatggtgaaagactgtcaatcgtcttgaatacacgtctgacttcgtcatggctaaaaatataggggatatgttcataggtcttctttggaatcatactgctgggatatagatagacctcgcaaccattccgggacataaacatggcaagctgccggattaagttgactttagaacggattgtctgcgggctatggtttgcctggcgttgtgtccaggcaagtacaagttctctgggaagcctgtccatacagttgtagtcaatcgaaaacctgtccaggtttttcagctcaaagtattctcgctcatatttataaccgaggcggtgcttttcttccaggaatccgatgatccattgtgaaagaccactggtgaatttataatctttttctttggcctgcattagaacacctccattgataacgtgcagttacgcagctgctcggtatccacacgaagatagttcgccgtagtctccactctttgatggccgagtatttcagagataaccggaaggggcacttctttttttaataattcggtagccagcgaatggcgcaaggtatgcatcccatgggacttttctggtgtaaccacaatcccggctttgtaaatgtaggtgtttagcatatggtggagacggttgttttcattaaaagcactatacggaactctatggcgaataaaaatgtttggtactggcgattcaggccggccattccttaaataatcaatgactgcattgcctacatcttcaaacagaggaagcgtcagtggctgcttagttttaaactgcacaagctctatgcagtttttctcccatttaatgttttcatatttcatatggatgatatcccttacccgaagtcccaagcgggcaaccatcagtatgatggcataatcccttttcccgattggattaccaatatcgacacagcccaggattttttccaaatcttcaggactccagatggaaggaagatgctccctggagcgcaagatgtttgatttaggtataaaaagggataaatccttttcatgatatccattgagatacagataatggaaaaactgcctcagttcacttaacagggcagcaacagaacggccatgataactggcaacggacgcaataaagggggtgatatgttccggcttaagcatacgaaaggattcgacctgctcctgctgaaggaacttagttaggcgccgcagcgttctggcatagtctgtaatagtagacaatacacatccgtttgcctctaaatgctgtaggaataggtccgtaatagcacaaaatggggcagggattgtttccgtatctgaccggaccaggctccaatactgcagacggccctctttataaaactggtaaagtgtttgaaaagcttcccgtgcggtgcgctgattgcgcgtaagttctccctgcaattcttcaattccatagaccttcttcaaaaaatcatgccagtcctgtagctggaagtcttctttattggaaaacttaagatagcgtttccagacttcccagcgatgtcggatagtagaatcagaatagcggagtttccggagctcattttcagctccaagcataagagaatatagcgcagagtctgattgaagattgggtttgttcatttgtgtttacctccgataattatgataggcttagccttccatttgagtaaacactacccacattaaaaatacaatcagaattatggaaagtaaaagccctgtaaagcttatcgttgcttgaattttcttagaaactttccataatatataacttttcataaagtatctcacagcaataacgctgcagccttgtaggtgggaaccgtttcatgggaatcagggaccacatggacacccgctggcctttgtaatacggatagtgaatgctgcatgggattcccttgctttcatattccctgaatatctgccgtacataatagattgtctgtggtgcgtcggcagtagtcagattatgatgaagctcaaagggtatgccagctctcctcacaatctccctgcaaacagcactgtctttccctccactgtccgtaactactaaaggacggccatatatccgcaaagacatttcagatgctgtttttactctttctatcgctttctgctctaaatccattcaaaaaagagtcagatatcttttcccggccggaactctgcctccttccttttcgctatcttgcaagagaaagaaaaaagacactgactctcatcagtatcttcgtattagatctgctcttttctatttacactgcaaccaccctcgccccccttccaacacaatttcattgccccgctctcatttcacaggttcattttaggaacctgtacagggtcttatcttaaaaatgtggcgttgccttcatatccgctaatttcatatagaaatactttgagcacgtcgaaagcggacataaaaatagaggcgtcatgacatattcttgatgtatgccacaacaacctctatatcatttagcacttataatttaccccggccttctgcgcctggctcatctgagccttccggtctatcaaatacaccttattccccttcttgaacattgcccctgtctgcttaaaccagaaaggtacatcatattccacacattgctccatggaatcaagtatccaggagaagtcacagactcttgcgtccggcccggactctccaccacaggtaacaccttctatcttccctgtggccaaatatttccggatatcgatctgctccagcattggctcatgaatcacagtccggtgtttgattggcaattccagaaaaacaggcaggcggtagtcggcctgattctgattctcacaggtacagcagatggtcgcattttcatacccgcttccccagtcccacggtaattccacctcaaaccggtggatgcgtttggtaataataacaaaatgcagatcgctacgcctacgaatgatattccatgcttcggcacgccatgcatctgcctcatccagaaaaaaatcagaggtcatgcatgtatacacactctcaccatctggctgcagcttgtagtcacccttgcggttacatttgaccggcatatcaaagttagaagtacgggttacaacactgctatccttaccaaattcagcatctctccgataaacatagcaattcgtacagcctgggctgatttttttacatccatgccatggattccaggttgacatatcaccacctccggttttcactaccaaacaggccagaagagccctttctcgtaaattaagctcttatttcccactctcatagaccatcagacattctctctcgccggtatctttttctgtcattcgctcccggaccgtgaacccttctttcaggtaaaaggccattgcccctgtattcttatcgaacacatgcaaggacaaccgcttcttctttttcaccgtttcaattagctgatggccaattccctgccccttgtgtcctgccgctacaaaaataccggcaatatattccgcgtccattccgatgaaacccagaatttctccatcctcctcgtacacatatacctccgcattgggcagtaccgattttacggaatcgaaattcttcttccaatactcggcgtctataaaagaatgggcttccagatttccctggagccatatatccataatcttgtctaaatcctgaaatttaaataatcgaatcatttctccgcctccttgcctctctattatatcggaccagcatctattgcgcaagcccaatcagaacatttgtttgtttttgtcgaatcacatcgttatatatgacagaacggttggttactatataattaccgaagcccggtcgtcgttatgatgagccaggatatttttctacagtcctgctctagcacctactatctcattaatatatcacctaatccaagctcctcattctcctgaacaggggtatccaaacgccgctctgactgcttatgttcctccgtcttttgtacaggccctccatcaagaaaaccgcctaatttgtttgcaacataatcagacagccatgtgcctccaaatgtcccatgactacgaagcctccatatagccagctttccgaaatcgagtttcacatcctcaaatggaaacagcaggttggttgagccctcatggaaaaatgacctcacattttcaaactttgtcccttccagtaagatatcttcctgtgtcaataattcattgatcccaatcacccattcctgtatatcccctccacagccctgcaaaatcatcccctccttgtgtttcatctgacgtaactcatttattgtgatctccatgaaactcctccttctacttttatgacagctcaattcttccatatttccctacagctatcgttctatataaccctcaacatgacagaccgcagagctcatccgttctatcgtcttctgttctaaatccaatcgccagagagtcagatatctcttatcccggtcgggatcctgcctccttcctctggcttcctacaggagagtgatttgtataaaaaagggggaccgcctttatctatcttacataaacggttctattctccctgtttcctgttctggaaggtctggcctctttaattcttcttccgtcatgatgcacagcgcagtcccatagtcctcatcccatagtccgatatgcagttcccccctctccgtatggatgggatattcgaggagggacagtccccatccctccttcatttgacgcagccagtccctcttcagttcctcttgttctgcttctgtcaatgttcctattgtccttacctcaatggcacaccacaattgcccgccatatgcttcaatctccggaaccatacattcaacctttgcacgtagcagctgatgattcaggaaagctcccatacaatcttcgtcggatggcagatgccgtttaaatacagtctcaatggcagtcttctgtttgattaaacgttcacctgataatatctccggcatgaaaccatctcggttattccagaacattgagactgtcagggggctatagagccggatggtcctgttctctgacagacggcagctgtaatccctggttggatgaaatacatggcctgtgaatgtggttaccatgtatcggtccggaaaggattccatatattcctcataacggcagaacggtttcagctcctctggcaggactatcctggaatactgtagagccaacattctcgccatcgtcttacggcccatcttatcagaagggacatacacgtggttttcatagtcttggataatatcacatgcttcccctatggtttccggcaatccagcttccagaatagcatagagtttttccttctccagtatccctcttcgggcgacttccctgtcgattacatcggctacccggtctagttcagataacgtaattcctggtggaagataacacgaaagttcccccagataaccactggtgtactgtatggcataggcgtcccattttttcactgccggactggctttcttctgttctgtaagcggaagttggaatatttctttattccagttctcatctgtcatatggacagaaagaaaacatcctttgtaagagtcatacccttgttccttactcctacacggggcagtctgttttttaatcacataacccatgggggtcatacagcctttcgtgcttacatattcccttccaatggattcaaagtccagaaacggctcaattctcttgtctatctgtattcctcgcttttccaactccagacgcccggccgcttcccagtttttcatgcggtcatccaggatgtaacggtccaggttctttgccacgtccattaccgtttcgattgagtccggatggtcccacataagcgctgcaccgaatctttccttctcatctttctcccacacggccatctcccgagtaagctcattgagcaattccaaatgtccattcttaaataccgtacaatcctccaggcattctgccaacgatggcacgtccgattccaccctggcgataaacggtatcatactagaagaatgcatccctttcagctccatgtatatccgttctatctcatcctgactggcgggcaggtccatccataccccccgactgatattctctctcttgatatatattcgcatcttacatctccaaataaaaagagacctccataaaggcggccctacaactattctaatctatcacaccagtatcgcgattcttaaactcaaactcattgcatcaccatgtctgatactgacctggctgattcccacacaaacgtctgctcatttctggaggcgacaccatagggagtcatagcagcacctttcttcagcatataacgctccccataacccctgaaatcaaaataagcgaaggaaggatcatctgtatcaatacctgctttctgaaagacctgttccgcatagcattctaatgaaatgatagatgggtccaactcataacagttcaaattgtttgcaatattcaaattcaactccaggtcattactttgttcaaattccaatactgccttatattttatcagtgtttccccatcaggaaatgtctggatccgctctgccaggatatttaactcattgatgtccgtatcactggcaatctgataattaaatagtggaacaatactctttacttcagtaataatgcaggaattcaacgaagagacctccagccgtttgagagcctggtctatttccatttctcctgcgggtaaatccaaccatacgccagtatgtttctctggattacaatccagggaattcaaccgcaaggagataaccccctcatggatgtctggatattccggaaggtgcatcccatcatatgtctctgtccatttgtcagatccaaagaataggtagcctttcgtagtgaacactcccttatcacttttccggagtgcctgccctactttttcttcatccaacatctccaatacttcatcggatgcctcctgaatcacatccaataactctcccatcaggcatagttcccccagcatgttatcattcaggatatctggttggaatacaaatgagtccaggttataacagatattgattaattccttcatatcaattctgtttccatcttcctggcgtagtttaatagctccttcgtaagtattgagttgtgcttcattcatctggctcagtttataggccagtaggtttacttcttctagcttcttttccccgcatgcttccaatacattgtcgagaaactgcggccagtcctcaaaccacttcagagctatttctttctcggaaggtgtatgtgcacacgccagagcatccgcaatctctgccttacctgctggaagcttcaggactgcacctgtgtatccccgctgtccgatgtattgatttgccatgattgttacctgcatttttgttttatacctccaaaaaaacctgctaacaaaagtcaagtacttttcagcaggtttttaaaattattcgtcaatctatttttgtgtacaataagaaggccggctttatatccagcctatacaaagtcataggttttatgttctattgatacactgcgattacccttgcataataaattcgtagaaacttatttaatccagcaatttttgcatgtttcttgcttttgccttccccttctttttttaagatatagttgtacacagcatcatcttttggagccggatggctcttaagcaccctcatcacctcatatccgattttcctgagcgttgaagagcctcgtttcgttatcttgcgttttgatccgataaactgtccagattcatacggtggcgggtcaattccagcccatgctatgagtgcttttgcactatgcagccttctcacatctccaatctctgctattagtttaactgcaaggacatcacctactccgcccatttccctgacggttgaatattcaggtagggacttcgcaagtacctgcatccgtgttacaataagagacagagaactatccacagttctcaatactgatatggcttcctgtactaacattttggtcgatggggtactggaaggcagtgtgggaatgccacttgaagctaattcatagactgtttcagccttggatctgcttcggtggtatttcttttcttttgcccaaacaaggtactcatctgtgaatgtttcaaggctcatggatgtgatcaggtcaaagtgccagaatctttccacaaagtcgctgagcttgtccttgccatttgcttcattccaactgctaaacagcttcttgatacccggcattacataatccaggatatgtgtcagctcctgcaaagctttcacatgaagctccatatagtaccgatatctgcgtcccagaagcttaagttccgcatagatttcttcatcgccttcatatctttgcagcttgaaccatttttcaattccatagttcgcaatcattattgaatcaagtttgtcggtctttgcccctcggatgctgttgtccttcgcatatttcttcattgcaaacggattgataacagatacgaaatatcccttattatgaaaaaatatcaatattggcaaatgataaatgcccgtagcctccatcacaatacgtatctctccatctaatttctgaagcagattgtgaaaggcttccaaatccttttctacatgttgcatctcaaaagggcggcacactatttctccgtatggcttaagtacacagacagtgcttttccctttcgacacatcaatccctacacttatcatcttgaacctcccataactgttatacgtaattgttccagccacacttattaccatccagtttagttggttacgcgggagcgaatccctacctgcttaatcgaatgcttataataagtggttggttaacggtttttttgacggatgctatgacccaaagaacgcctcgtcagaccaattactccccttattataaataaaataagtgcagatgtcagagttaattactctctaacaactacacttttatggtactaaagaacgcctcgtcagaccaattactccccttattataaataaaataagtgcagatgtcagagttaattactctctaacaactacacttttatggtactaaagaaccaccacaaaggcggttcaccacatatttcatttatcttcatactcctgcatcttcagtctcacactatatcggacattgttttatactccctcctacttttttctaacctattgtttcaatctataaataccccatcacccctcttgttatttgtaaatcgatttcttgcagtgttcaattctcttaaattggaccttactataattttgtaatgtattctttgccctgcatattcagaaaaaggttcttcactcttttttacgaactgaaagcctgcactttcataggtatgctgcgcaggaacgcaaacctgattcgtccaaacgactatcctttgggccccttgcgcaataatgcgttggacggcctcccgcatctgtcgttttccataaccgtttcctttgtatttcgtcaaaatacagttgtgaccgatttctgttgattcagctaggttggtcgggttccaggaaacaaacccgataggttttccttctaagactgtcataaagccgctaaaatcagcaatatggggattatcataaaaaaaatcatcaaactcttgccattgatcatgccaattacgttcaaatttcggttcaaaagaatagccgtcttttagaagagttgcaagtgttccacgaggaaaatctgttatccttttaaactcaatctccattttctcctccacaatttcgatttatcagcccagtaaacctgaaatgttttaatcaacaactattttgacaggcgaacacgttccacgattgcacttgctttcagaaacactacaagcggcaactcccagtgtaatatccatcagtgcttttaatacaatcttgtcacccgctttagaaactggttcttccactgaaatactgccattggtgctgattttcgtgtgcatgaataagttgacaggtacgataacagcacgttgttcatcaagcaccctattgatattatcaaagcagtttggatgttcttcgccgttatggtagaagaagtcatacatttctggccggcaacatgggtggagcaaatcatgttctcccacatcatccgtaatcacttttatcatggggcggtataggtttgtataaataatatctccaacatttaatttcaaagattcgttacagtcaatcgtcactccagttgaaagaaattcatttacatttccattcacttcggcaaaaaaatctaccacttgcccgccttcaatatcaatcactgtaatactttgaccttgcttaacatcaattttcattcccgaacacgccggaattatatactctctactcaatgtatttgcctcccaatttccgatttaggtaaattataccacatagaactttctccgtcatgacattcatcagtcttacatctcaaattcattgacatccataacatctcgcatccactactatgccaattttgaagtatcaacatctatccagatgatataataaaaccgctatattttcgtcatttcaaggccatttttcacttcaaagccgtgggaaggtgtcgttccaatgataaataaaaattttgtaagataaacttaactttctgcacaccatatttctccattttatattttataataaaaatatattaactacatgttctgaaagtgttactataatgcgaaataggaggcattctgatgaaaatagaatactttatagcaggtgtgactgtgtatttctttttcagtctgcttaaagccttattatatccataaagatggaagggtggaaaaataaatatcaatttaaacctcatgagatactataattttaataaagattatatagagagcatctaacaataccattgtataaacgaggtaatatttatggataaaaaactatatcgttcaacaaacgaccgtgtttttcttggcctttgcggcggtcttggagaatttttcgggataaacccattggctttccgattgatttttttcttctcagggcctggacttttagcctatcttatactctgtgcttttgttccagaaaaaccatattaaataaacattcactaattcaccagctttacatctcaagttcattgatacccatatcttcttctacctgctcattggcagatataatgtttacatattcactttaccgtgttcatctaatgttcggaatgccacagctattaaataaaggatattgccattagctctgacaaggtagagttcggctttagtgattagccggaaaacgtctcccacttattctttatgctgattcacaagttactatttaaaattattagtgcttcttgattatcgccctgataccaacacaataatataatctatactccatcctcctctgtgtaagctccaatgtacgcgggcaaaacagcttccagaaaactgaaaagcccctagttcactactcaaaccaggggatgtcatctacacctctgcgattttcacgttcaaattcacagttgaaagacatttcatttttacctatttcttgccaaaaaccacaatatatagtgtttttatatgcattttttcaaaaagtcacaagtcctatccacatcacaattccaacctctggtgattggatgttttagataatttgatcacctgctgctataactcacttcaaatcaatattcattactaacttatcaaaatccgactcatataattgatcttgtatcaccctgtgtttttcaaattcactttctgcaaaagcttttgcaatttcattctccaacctttttttatcaagcacatatccttgtaacgtaaatgttcttaatacctttgtcgcccattgacgaaactgcgtcgctcttaatgaattaattctatagcccactgaaatcacagcgtccagattataaaatttcgttttatattgtttcccaccagaagcagttgccgaggattcctcgataactgcttctggtactagttctccatccttaaatatattttttaagtgtagcgaaatattatcgatactacactcaaataactgtgccatctttcaattatctcttcatatccatattgtccttttgtatgtatgaattttacattctccaaacgatattcttgtttcatattcttacacctcctttctgtgaatatattattgcccacaatggtcagcaagtctaaatcctggctggaaatccctaattacattaaactttaaaggaagattacgacatcttggtgccgtctgtctccctcttttaactgattttatcgccatccaccaacctcagatctattcacacgatttaacagaaatctattattcgccaactgcctccgggaaggtttggatgtagataacacaattattagagggcagaacacaccccaaatgtaattcagcttcatacatattccagcttaacagattccaatcaacatctgaactgcactccatgaataacctttttataaaaacaggagtgtcactgttttgacactccatatcacttttctggattttaatgtagaactttatatgctactctaaaaatttcttttcccatgctgcaccgtaacaatatccacttccttctttcttgcatgaatcttatatataataatataactatccacaatcagttcacggtaaccgcggtttgcatatctgccagtttttcgctccgcgcagcggtatggatattcttccagactgaaaatacctgcctccaaacggtccgcctgctcttctgcatattccggaacctgttcataaatattactggtaaatactgtctaaatcccgcagagcacgctgaaacatcttgattgtatatttattttgcatactttctcctcaatccgctcaatgcctccctggcatccataaggacggccccaccttccatttcagtctccgcttctgcaatcgcagcatcaatctgtgtatcagttatcagcctctcatacgcttcaatgctcatcactacaagatccccatagccatttttggttacaaaaatcggttcctggcttttatggcagatatctgaaatttcattcgttttccttaaatctgtaatcggcataatctgtggcataatatccctcctctctttgtacataattatatcattattatatacaaaattcaatctatatataacgaatccagactctcatgaatctttcgctcataacattaaagggttagagacatcatcataccgctattcaattccatctccgaccggtttttactaataatccgtatctccctccccaactgccgcaccagccgatcccgtaaattatcttttcaaaatctggtttacttcgtgttaaattccactcataaatctatggctatcaattatgcacatttaggtgatgtaatgctgatgaaacagttaccaaatgtcactaaacaagcgctttcaaaagctagactcggtatttcaccagacagatcgaggacgattctatcatagaatggcactcaactggctaaagccataataagggctgcccatacgaacgtgacaccccttatcattacaatctatatttatcatcaattatttatgcttccgttgctcctccacaactggatccctgaccagccgtacagccataacaatgattaccaaaacatattttcctagctctataaggctttccaatcaaatcaaagattgtctcacccgtcgaaacaggcaactcggacgcctggttgaaatcgcaatcgtagagtttgccatcataccccaccgacacctggtaacggcacataagaccttccactgttgaccggttaaaagaactgcacagcttttgcatgtagctgttcaaattgcagctgttctggagaaagtgaaaaaatcgccctgtgggattattagttattgtaaatagatgattaaatacaattccataatctcccagaagctttactttgtattctttctccatagccccctgcgccggaggaaaaaatgctcctgctggattatagaccatgttcaaaacgaggtcttcttcccggccatatcccaacgcgtttaattcctggataaccttaaccgccctgtcaaaacttccgtccccccttacccggtccatcaccttagcctggtaataaggaagggaacagaccacctctattttatgatctgcataaaacttcggtaaatgtctatatccttcttctgtcagtattacaagattactgcgtacaataacatggctgcacattttgcagacttctttcacaaaccactcaaaatgaggattcatttcgggcgctccgcctgtgatatctaccgtcttgactttttgttccctgcagacccgcagacaagcctccatcacatcacgctccatgatttccttacggtttgggcctgcttccacatggcaatgcttgcatgacagattacataacttccccacattgatctggagcacgtccatattatcttctgtatactggaagtgttcctctatccggctttcaaacgccggtatgtattccatttggttcaattgtacgattgactcattcatctcttatagctccaatttctttatcatgttcttcatctgtacaccgtgcaccaatgacgcgcctccccggatggccgcggctacatgaactgcttccatcatctgttcgggacttacccccttgtttaaacagtcattggtatatgcatcaatacaatatggacactgcacagtatgagctactgccaatgctatcaatgatttctccctggcggtaagagctccctcttcaaacactgaattatagtaattaaaaaacttttctgccagttttggtgattcctcaccgatagaagcaaacttttccaaatcttccggattataatatatgcccatctctattcctcctttgtacgccgcatctatatcatcttctccagtatttctattatgtctcttacaacacatggacagaaatcgaacaaaagcccttgctccaacacctgttccatctcatcctccttggaaatgtcgtgtcccagcagctctctgcacatgcaggattcgtacttttcggcaaacaaacgcttgaactcagaagtcttttcacgcatgatttctttttgtttcagatcgttattcatactatgcccatacttgagaccgattaccatcagcgcaccggtcaccgccccgcatgtttcaccacactgcattccaccgccaaaacaggcagacatcttcctgagaaggctttcctccatctccaattcatctgcaaaccggcctgccactacctgtgaacagtcaattccctgcataaacagttcttttatttcctcttttgtcatctatccttccctttcccaagacctttaccagaatcttgttttcattctgtttatcatcgactttgcgacatccggttgttcatggtaatccaggatttctgttaaaaggtgtgagacaccctgaccaccattacgtgtcaggttccctgcacatgatgcgcaatacgtatacacagtctcatacccttcctcagtcacatggcatgccatacctttggcaagctccggctcctttcctcctgcgcaacctcccaagccacagcactgtgtaccttttataatatcgggtttcttctgaaagaacggctccagccatgatacccactgctggtcttccctgtccggacatggcaggaacaaacttcccttcccatctactttctgccctattccgagttgtgataacttttcataaatactaaggacctgtatttccagcttatccttcaggaaataatagcagttgggacagagaatgacaatttcctgtatatctgcggtgcgaagtctttcattaagccgcctgattattttcccttcctgttctttcagtccaagttccgagaccggtttgccgcaacagtcaaacagcactcccatgtctacctcattcttcagtattttgattaatttcctggtagtctccggataaaaggatggaaaattgcaccctggaaacagtacactcttacctgtcatatgccgttcattccggaatatataatttttcttttccaacaacagcattgcatatcctttttctcggcacttccctccgttctcttctacctccgtccgccgcatatccaatatagtaccacggccatcaatccctatcggacatacctcagaacactttccgcataagaagcaatgatatgcgagctccctcagtttaaccgtatcaccgatatctgccccgtactttgtcaggaaagaacagtgtttctgacagagatggcagtgtatacacttgtccccatcctttatcctaactttcctgtccattgacatcctccactccctctggctgcaccacaaactttttcttgaagaacacccccatgcccatgactattaccgccagtatgaccgcaatactgatataaagtaccctgttttccttatccgccaatcctgatattcctatggtgtacatggctgtccccggcaacataaaaatcagtgagaatatagagtaggtgctgaaagggatatctgtaacaccatatgcaaaattttggagattataggggaacagcggtaccagcctggtaatcatgagcacaaacagttcattctttcctgcttcatcgaaaagccactttttaaggtatcggtttttcataacaaccggtttaatactatccctcaggaagaagcggcctgccagaaacgctgccatggctcctatcatggtagcaatagaacaacaaattgttcccaataccggtccgaaaagcagtccggccagaacagcaaaggtgactccgggaagcgttagcgccacacatccaacaaccgtaatcacagtgtacagaaaaattgcattcaccaagttttcttctgccatctgccttaggagattcatacttcctgttccgcttaacatggccgaccagccaaatatgtggttgcagactaatacggctattatcattcctatgaatagaattagttttttatatgtatgaaacactgttttcatttctgtctcccattgacacaaaaaagcgttggactttttcaaagcacaacgcttactgttttcctattacttgcctgcctgtcttattttaaagatatcgctcaagccgatcattaaaatacctgccactgtaataatacataataccaaattgattttggagaatggtattcttgtctgatggatgccttcccgtatcaaagctgccggtaccaccttcatccgttcagccccatacatgataaacccaatcaatgaacaaacaatcaaattgccggctgtaaagaggctgttaaacacattttcccttttcctgaaaacaaaccatatcaccacggttgaaagaattaacaatcccccaaaaatatatccggtattcacccgcatctgcagccattcactcttaaaacacaatatggcgatcgtcatagcccatataaaactattataaacaatcttaaatagcttcatcatatcaatcggttactttgccagacggaaaacaacggttacctgagtaccatcctctggcagcacatccttatccccataaaacttggcaacatcattctgtgtggttccagtaggccatgcagcatcgctcacaataccagttgcacagctgtccagacagagcacacatcctgtattattttccttggcgctctcaatatttcctccaaaccgcagatccatggtatagtcttctgtacatttaatgatatcccggaatggaatttcatcctgaccatcccatttcacaaagacatccagcttatcaccttctacagattttccattatctggccctgctttcatgtctgctgcggttaaattatcaccggctttggccccgatatcaagcaatgcctgataaaactccttctcatcagccagcccccgcaaaacagccttttctccgttggaaccacctttatatacaataccatgtctggttggttctgtaaaatatgtaccatttacttcacagagcatgacgatttctttcttatctttatcaactgtcatggtttcctctgcttccgtctcctgggccttactttccactgtgttgctttttcctccgcaggctgcaagtgaacataccattgttgctgctgctataattgctgctaatttcttcaatttcatcacgaaacctccatagttgattagatattatctgcaacatccgcatattaattcgaattctttttcttttgcttttccacatataactgcctgaacaaaacaatgagcgctgacagcgcaaacagcagaagaagcgcagtgacaaacatcttagcgccaccagtcagcatcccgccaacatatgaataaattatagtggctggaagctgtccaataccagtggcaatgaaaaagctgccaaatgacatggatgtcaggccagccgcatagcttacgatatcaaaggaaataaacggcagcagtcttgcaatgagtatgctgagacgcccatgtttttcaaaaaactcatcaatctgcttcaaaccggttctgcttgtaagtttctctactgcatcacgccccaacagccttgcgatatagaagcatactgccgcccctgccatagcgctggaccacgataaaatagctcccttccaccatccaaacagatttgcattcgcaaatgttagcaggaacgcaggcaacggcgctgctatggactgcaatatcatcagcaggaaggacaccaacgctgcataggcgccatacgattcaacaaactgccgtaccacagtaaaatccccgcttgcaaacatcttcagaatgttattcatcgtagcattgacaggcggtacaaaaaaatataccagtacacccaacacaattagagctatgacaacgaatttccctatctttcttgattttttctttttcatattcgaccccctttcacaaatatttatcatattcattctaatcatctgccgtgccattgaccaatggttcttttctatactgtaagtcattggatagattaattctatgcaatccgaattcacatcaaaaaaatttgatatatctattgacaactcgttatttcaatcatataataattatatcaattttttttgatgtgaggtgacgcctatggagcacaggtttacaaatgatgctaaaattttcaaagcgctctgcgatgaaaagagacttatgattttagaacttttgcaaagcggagaaaaatgtgcttgtgtcttaattgataaaatggacatgggtcaatccggactatcttaccatatgaaaattctatgtgaatccggcattgttacaagcaggcaggagggaaaatggactcactattcactcagtaaatccggcagtgaatatgcattaaagcgtttacgctgcttaactaccccaagagcagaggacgcatttgaataaatggtcatcttcggatggcctttataagccccaatacatcaattttttttgatatgatatttacaatggaaatggaggtaatacatttggactcgatacaaacattttttctatttatccaggatcaaatattaggaatgaaatggttaaactccctgataaaaaatcttttaaccgctcttaacgtagatgtagacggccgattgggcggaagtattcaattttttatttacgacgtattgaaaataacaatcctcttatgctttttaatttttattatctcttatatacaaagttattttccacctgaaagaagtaagaaaatattgggacgctttcatggcgttggttcttatatcatttcagctttgttaggtactgtgaccccattttgttcctgttcatccatcccactctttatcggattcacaagtgccggtttaccgttgggcgtgactttctcgtttcttatttcctcaccaatggtggatttgggcagccttgtactgctgatgagcatatttggcgcaaaaattgcaattgcttatgttatagttggcctaatgatagcagtggccggaggcgctctgattgaaaagcttcacatggaaaaatacgttgaggaattcattaaatcagccaatggtattgatatggatgctcctgctctaaccagaaaagaccggctatattttgccagggaacaggtaacggaaacgtttaaaaaagtattcccttacattttagtaggtgtcggtatcggtgcagcaattcataactggattcctgaaagctggatccaaagtatactcgggagcaataatccctttggtgttattcttgcaacgcttgtaggcattcccatgtatgctgatatctttggtacaattcccgttgcagaagctttgttagccaaaggggctcagctcggtaccatacttgctttcatgatggctgtcacaaccttaagcctgccgtcgatgattatgttgaaaaaagctgtaaagccaaaactcctgaccctgttcatagtcatatgcactaccggaattattcttgtcggatatctatttaatgtgtttcatgcattttttatataatcaatgaaaggggtaataaaatgcaaaataaaaagacgacaaagctttacgtaataacaggtttcttgggggctggtaagactacgttgctgttaaaactgctagaacacctgaaagggagtagggttggtattatccaaaatgaatttggcaaattggggattgacggcgttatcctgaaaaatgatgatatccatatggttgaaatcaaccgtggttctattttctgctcctgtctgaaactctcctttgtcagcgcactcagtgaaatgacacagcatgattttgactacctgttcgtagaaagctcaggcttgggagatccatccaatgttgaggaaattcttggggccgtcgatgctgtctccggtaaaagttatgatttctgtggtgttatctgcttagttgatgcagttaattttatagatcaactgacagatttagagactgtgtacagacagcttaagcattgccatcttgccgtcattacaaaatctgatctggttaattcatcaaaaatggcagacctggaaaagaaaataagagaaatcaatgcggtctgtaggttaaccacaagcatacaaggtaaaatggattacagttttttagatgatgatttacttttatatcagtgggccgaaagtgaagaaaccaccaatacggaggaggcaaagccaaaaaccttattcatggaaatatacgatgctgtggataagaatcaattagttaaatttctaaatgaaatcattccaagcgtatatagaataaaggggttccttactatcaacgggattgggcggcagcaaattgatgtagtaggcaccaaaattaattttaaagaaagcgtggattccggtaatgcccaattagttttcatctcaaaaatagggccggcaatcattaaaaacatactttcagcatggaatgacaatgtagaagctgaaatgaaattaaaaaattagaggaggtcacagatgaacattaaagtgataggtacgggttgcgaaaaatgcgatgcgctatataaaaatgtccaaaacgcaatcaaagaattggatattgatgcggaaatcgaaaaggtggaagacctaatagatatagttaaattgggagtaatgacttccccctcattaatggtggatggaaaactggttatttctggaagggtcgctaaaatggaggaacttgtcaaactcttccgatagacactttcatacaattttcaaaatggttcctggcgtatctcaccaggaaccattttatataacaatatccaaatattctatagcagctttattattcacatgactatcaccaaaccactaataatgataaaaccgacacgtacactactcttatcagcactttccgtaaaattcatatgcgcgcattctggtttaggcaccagaataatattttatgctttacaaattcaaatatatattttatgactactaccacaaatgctgtaaacattaatccccccaacccactaataccggcccaaagcaaccgataaatattacggccatagatgacaaataaaatgtgggaagatgtgcgataaggtacggtctggctgtccactgtctctttcacgtttctctcaatatcaccacctcaatattcttcccataaagaacaccaaaatcctccatcaatcttgacaaaggtgttacactatggtacacactatacaaggaggtggacaatttggctgtttctaaaaataacataagagtacctataacaatcccaaaagaattaaaacagcagttagacgaactggcaaaagaggataagcgtaccttttccaacttatgcgctaagattctgtctgactatgttgagcaaaaaaaggatggtgagtaatctttgagaatctatatatacagccgtaaatcggtatatacgggcaaaggggaaagcgttgaaaaccagattgaaatgtgcagggagtatatttcagccaaaatccccgaatcagataaggcggaaattgtcgtttatgaagacgaaggcttttctgcaaaaaatacgaacagaccgcaatttcagaaaatgcttcgtgatataaaactaaacaaaccagaatatgttgtttgttaccgccttgaccgtatcagccgtaatgtcagtgacttttcttctctgattgaagacctgaacagctataatatttcatttgtctgtatcaaggaagaatttgacacctcaaagcccatgggaaaggccatgatgtacatagcttcggttttcgcccaactggaaagagaaacgattgcagagcgtgtccgtgacaatatgctaatgctggcaaggaccggacgttggctgggcggcactacccccacaggatttacctctgaaaagatacaggaaatcatcattgacggtaaaatcaagacttcctgcaagctaaaggacaatccggaggaacttaaaaccatcgactgtattctggaaaagttcttagaacttcggagtatatccggagtaagcaaatacctaatcaagcaaggaatcaaatcacgtacagggaaaatattctctctgttagggattaaagaaatactgcaaaatccggtttactgtatcgctgatgaggacgcatgggaatactttacggaacatcattcagacgtttgctttgaaaaaaccgagtgttccaataaatatggtctgctgacatacaataaacgtgattacaggaagaaaaatgccccaaggcagggtatggataaatggattgtagctatcggaaagcataaggggcgtatttccggtaaaaagtgggtagccattcagaacatcctgaaagataacatccccacaggtacgaaaccagctatcatgcataatgactattccctgctgtccggcttaatcttctgcgacaagtgccagagccggatgttcgcaaagcagagaagcggcaaaggcggcaaccgtgaactctactactatatttgtaacaacaaactgcgtggtggtttaaaattatgtgactgtcaaaacctcaatgggcagcaggcggacgatattgtttgtgaatacctcatgcagtacacggatgaaaattccggtatctacaagctgctggaaaagctgaaacaggatttacagggccagacacaaaaaagtcccctatcagtccttgatgataaaatcaccaaatgtaacagcgagatggacaacctgatcaacacactgtcacacggaaacttaggcactgctttcattgaacgtgtaaatgccagaatcatggaactggacaaagaactggcttccatgaaagaagaaaaaaaacgtctgcaaaaggatgtcagcgtcataactgacagggaaatccaagttgacatgctgtccacggcattgtccagcttcaaagacaatttccatacactgacaatcgaagaaaaacgcaccttaatcaagctgatggttaagaaaattgtctgggatggcaaagatctccatatttttatcgacggcgagtagggaactgtcagccctctactcgtcgtatggagcaaagttaccgtttaggtggtggcgcatttcccacactcatcgccatcatctccatgttttttgtgggtgtatccggaggcgcctttgactccatgctgtcagccctgctcctgaccctgtttattgtactgggcgtatgcatgacctttgtggtctccaaagccctttccatgaccgtgttaaagggaattccctcttccttcaccctggagctgcctccttaccggcgtccccagattggcaaggtgattgtccgttccatctttgaccggaccctgttcgtgctggggagggccattgcggtggctgcccctgccggccttttaatctgggtcatggcaaatgtacaggtaaacggcatcaccctgttagcccattgttccggtttcctggatccctttgcaaggcttcttggaatggacggcgtgattctgatggcatttatcctggggcttcctgccaatgaaattgtaattcccatcattatcatggcctacatggcccagggaagccttctggaatttgacagcctggcacagctgagggaattgctggtaaataacggctggacctggattaccgctgtcagtaccatgcttttctccctgatgcactggccctgcaccaccacccttcttactatccgaaaggaatcaggcagttttaagtggacagttatgtccttcctggtgcctacggtctgcggaatcgtgctgtgctttgcctttacagccgcagcccggttgtttgtataaaaagagcttccccgcacatacggcaggaaagcaaaaaggatgggacaacagcacacatattcctgtgctgtgtcccatccttaattatactttatcaatcaaatatcgtgtctgggggattaatacattccgcccatatcaggtgctgccgggcctgccggagccggctccttgatgtttgcaacaacagtctctgttgtcagcagtgtggaagcaacgctggttgcgttctgaagtgcgcttcttgtaacctttacaggatccaggatgcctgcttcaatcatatccacatactcttccttgtaagcgtcaaagccgtggcctacagaggattcttttaccttatttacaataacggagccttccagtcctgcgttggccacgatgtggtacagaggagcctccagagcctttaagatgattctggcgccggtcttctcatcgccttccagtccgtcagcaacactcttcacttctcctgctgcgtgtacataagcagaaccgccgcctgcgatgatgccttcctctacggctgctcttgtggcgttcagcgcatcttccatacgaagcttagcttccttcatctctgtctcggttgcagcgccaacacggataacggctacaccgcctgccagcttagccagacgctcctgcagcttctctctgtcaaaatcagaggtggtttcctcgatctgcttgcgaatctgggatacccttgcggaaatggcatccttgtcgcccatgccgtcaacgatgatggtgttctctttctgaaccttaacggattttgcacgtcctaactgctccatggttgcatccttcagatccaggcccagttcctcggagataacagtgccgcctgtcaggatagcgatatcctgcagcatctctttccttctgtcgccgtagccgggagccttcacagccactacgttgaatgtgcctctcagcttgtttacaatcagggtggtcagtgcttcgccttccacatcctcagcgatgatgagaagtcttgcgcccatcttaacaacctgctccagcagaggaagcagatcctggatgttggagatcttcttatcggtgatcagcacgtatggatcgtctaagttagcttccatcttatccatatctgtgcacatataagcggacaggtaacctctgtcaaactgcataccttcaaccaggtcaagctctgtcttcattgtcttggattcttcaatggtgatgacgccgtccttggaaaccttctccatagcgtctgctaccatggttcccacttcatcatcggaagcagagatggcagctacccttgcaatctgctctttgccgttgatcggcttgctcatcttcttgatagcttccacagctgcatctgtagccttcttcataccttttctcagaacgattgggtttgcgcctgctgccagattcttcatgccttcgtttaccatggcctgagccagaacagttgctgtggtggtaccgtctccggccacatcgttggtcttggaagcaacttccttgatcagctgtgcgcccatgttctcatatggatcctgcagctcgatttcctttgcaatggtaacaccgtcgtttgtaattaacggagcgccgaaggacttatccaggacaacgttgcgtcccttcggtccaagggtcacacgtacagtatctgctaactggttaacgcctgcttccagtgccttgcgggcttctacgccatatttaatctgctttgccatctttcatcaacctccaatattctatgttctactgttttatttattattcaacaactgccaggatatcgttctgctttacgataacgtacttctcatcctcaatctctacttctgttcctgagtacttggagtagattaccttgtcgccggccttaacctgcatggttacttccttgccgtcaataactccgcctggtcccactgcaatgacctctgcctgctgcggcttctctttggctgcccccggaaggacaatgccggacttcgttgtctcttctgcaactaactgctttaacactaccttgtcaaacaatggtactaacttcataattgaattcctccttgctcgatattctgatttttctttcttgatttttttccttactactttcttttgctcacatgatatgttatatcaccagttattagcactgtcaagagttgagtgctaatttcttttaattttattgtttttttacaatttgctgtttctttttttttccattcgtattacaataataacaataaggcataatatgacccataggggagcttttatgcatcaccattacaagaaaggggtttttggcatggcaaagaaaggttggggtaaattcgtggcatttgcagcagtaaccggtgctgtagctgccggcgtttcctacgtacttcagtataagacataccacagggagctggaaaaggatttccgggaattcgaggatggcggcgaggacagaaccgacgaggacgggacagatcgcaccattgatacacgcagcctggaccgcaattacatctctctttcctccagcaaggacgaattcaaggtggctgccaaagatatggcccaggcaacgaagaatgtccttaaggatgccggaagcctgctgtcggacacggcccatgaggcggtttccgctgccgtggacacggctcagattgctctgcagaccgtgaagacaaagaaagcggatttcatggatgagcactccagggataaggatgatgattctgatttgtttgaagatgagggctttctggacgacgactatgtggacgaggacgacctctatgattaccgccgcatggacggcagctcctcctatgattcaggagatcttacggaagatgattacgacgacagcagcgaggagcctgagaaatcggaagcaggccgctctaccgctatcattgaggaagatacgctggaataacacagcggtttaagaccatgtaaacgaaccaaaacagtataaaacagaaaaactccgggagcatgacagtttatgttcccggagttttttggcactttattctgtatttcatttatccgtttactcttttttttcttctttttaactctttttgactcctttattcctcccaggccagaaggttaatccacacaggctggtcagccagcttctcatccatgatgtaggcatggctgtcatcctcctgggacataagctgatactccccacgttcctctatatagatccaacggtcatctaactgtaccgtaccgtcctttacttccagcttccaggtggatgtctctccctcctggttcagggtggtataggttacctctccctccagcctgtcaccggaaaaccttcctgtcttgcacacatccctggcttccccttccgggctggtctcataatagcagtatcctgtatggcccaggccctccatcttcccatccttccacaatccctgggagtaatcatacctgggggcatccagttcaaccacctgaagggccgtacattccccttccggcctgccgcccttaaaggtaccgtaatacagggtcttaggcatggtaaggaccagcccctccccctccatggactggctgaatgaccggccgtcataaagataccgcgccccatccatgacctcataaaacagggtcacaagctcctcctcaccgctgtccatgacctgggcggcagtctccaaatcctgcgtctctaatgcatttatgattttgtccagaaccgccttctgggattctgtcacatccggaaggatctctgcgtcttcccctcccgtccgggccagatcctcccctgcgccttctgccgcctgcgcagcccctgcggtacctggataagccccggccttccccacgggaccgccatcttcatccgccggacctgcctggttatacatccggccataagcgctgcccgccgttcctgcctggtcataggccctgtcatgctgcccccagaaggcactgattcccagtaccgctgcaaaagcagcggcagcagccatatctgtccatgtattattcctgcccttcatggcataccattcctttcctgtcatttttcctgttatattacctgttatattacctgctatattatctgttatttaacctatcatcctgcctgctgtctgaaaaattcatacagcagcttaaaatgtccaggccttactcagtaacttagtgccatttcggatttcctcctcgctgagactggcatatcccagcataacggttgaatcaaacagcttctcctccggctgtatgaagcatcctgatattccataaaccttcactcccagttcagccgcgcgggccaccagactttcctccgcctctccctgcctgtgggtcaaaagcacatgcagccctgcatattctcccctgattaaaaaccgatcctccagttccttaagccctgccatcagagcatcatgttttcccttgtacagggctctcatgcggttcaggtgtctctcataatatccctgggttataaactgatagagaatgttctggtcaatcctggacaccgtggaaagatagaaaccggctctttcccggtatgcctccagcaaatgctccggcagcaccatgaatcccacacggatagccggggctatggacttggaaaatgttcccatgtaaatcacacggccgccccggtccattccctgcagcgcgggaataggctttcccttgtatcggaactcgctgtcataatcatcctctatcagataccggtctgcaccgctgtaagcccaggccagcagctcctgccgccgcttcacaggcatgacaatccctgtgggatactgatgggaaggcatcacataggccacatccgcgctgctgcgggaaagccgctgcacatccattccataccggtccatgtccacgggaatcacaggatatccctcgcccataagcactctgtatgcctgcttgtatgtagggttttccatggcgattttcctgccgtttcccagaatctgggataggagcatcagcagatactcgcttcctgcgccgatgagtatctgctcaggcctgcagtccacccccctggcggaatggaggtaatctcctatggcagtcctgagagccctttccccctgggggtctcctgctgcaaacatctccttgttatcatccaccagtgtattcctgctgattttcctccatgtattaaagggaaaactgtccagatcaattcctctgggagaaaaatccacctcgtaacggtcctttccggtgtctcccggctctacaaaagaaccgcctcccttttgccgtacttccaccagctcctctatcttgcagacaaaataacccttgcacggcagtgcctctatatacccttcagacagcagctggtcataggccatctgggtggtactgcggctcagcctcaggttcctggccagtatacgggtggaaggcagacggcttccggactccagctttccctggcggatttcgttttttatgtactggtaaatctgttcatagagaggactttctgactgactgtcaaagggtactatcaattccattttccgccccttcctgccgcaaactggcattatcatttgtatttgaaataaacattctaatcataccagtccaggtgagagatgtcaatgtgtttttatatttattctgttaattcgtattattcaagcaaaatacaaagattattcaaagataatatactcttttttctgatttgtatattgtaatcaccacggtatggaattataataaaagtaggaagacaatccaataaaatcagttgagaaaggacggatggacatgagcgaacagactctgaatatgttaaagaagctatctcccaaaaaggaacattcactggctttccgctgtttcataggggctgcggccattgtgctgctgaccgtgtccgtgcacatcctggtgttcacagccatagagaagcacagcgagataaggaaccttccggaatggtaccagctgctggcaggtctgtctgtggatgcgctttacccgctgttcatagtgtccctggcatccatcatcaagcgggtgttccgtataccggtacaccgtctggaacgcaaggttttcaagtttacctatctctgccttggacttatcgccgcctccagaatcagcatgtatgtgggactctatgtattctttatggctttgtttgcggcaggcacagccatatatatcattatcggcatacgttttctctacgaactgtttaaataccgcttcatatcctgccggtattattaaatggtgtactatcagattacgcgttatcaggtgatccgtcaccggattatgcatgggatacggtcataacaaatgccggggacctttttcatcaggttccccggcattttctttatcgcataaatgactgctttgatttatctgttattacctcatggttcatcctatttgggaagcttaaatgagctctttaaggatacaatccggttaaacaccggcttctggggcgtgctgtccttgcagtccacacagaagaaaccgttgcgcacaaactgatagctgtcataggcctctccctctgccagggccggctcaacgtagcactcctttaacacaaccagagagttcggatttaagttaaggctgccgtcttcattcagcttgcccttctcctcgtccacaatattctcataaaggcggcactccacctgtcttgctgtgggaacagccacccagtggatggttccctttactttgcgtccctcaaaaccggaaccgctctttgtctccggatcataggtgccgtgtaccacggtaatgttgccgtcagcatccttctcacatcctgtacacttcacgaaatatgcgcccatcaggcgtacctcattgccggggaacatacggaaatactttttaggaggctcttccatgaaatcctcccgctcaatataaagctcccgcccaaacggcaccttcctgtctcccagctccggattctccagattattgggaacatccaacatctccacctgtccttccggataattgtcaatgaccagcttcaccggattcagaatagccatcatacggggcttcttaagctttaagtcctcgcggatacagtattccagcatggcgtagtccacggaactgttggccttggatacgccaaccatctccacgaacatcttgatggcctccggtgtatatccccttctcctcagagccgcgatagacaccagacgggggtcgtcccagccgtccacgatgttatcctccaccagcttcttgatatagcgcttgccggttatcacattggtcagatacagcttggcgaactcaatctggcgcggcggattctcaaactcgcactccttcaccacccagtcatagagaggcctgtggtcctcaaattccagggtgcagatggaatgggtaatgtgttcaatggcatcctcaatgggatgggcgaaatcatacatgggatagatgcaccacttgtcgcctgtgttgtggtgggacatgcgggcaacgcggtagataaccggatccctcatgttgatattaggggaagccatatcaatcttggctctcagcaccttctctccatcctggtactttccctccttcatctcctcaaacagagcaagattctcctccacggaacggttcctgtaaggactctccttgccgggtgtggtaaagtctcccctgtactccctgatctggtcggctgtcaggtcacagacaaacgcctttcccttcttaatcaggaatacggcgcactcgtacatctggtcaaaataattggacgcaaagaaaagcctgtcctcgaaatcagctcccagccacttcacatcatccatgatggactccacgaattcagtcttttcctttgtggggtttgtatcgtcaaaacgcaggttgaacttgccgccgtacttctgtgccaggccgtagttcagtaagatggacttggcatgtccgatgtgcaaataaccgtttggctccggcgggaaacgggtctggacatggtcataaacgccctctgccaggtccttgtcaatctcctgttcaatgaaattcctggagactacctccttttcctcagtttccattacggtatccttgtctgccataattgttcctccgttacgttgctattgtgataaatataattattaatcataacacaattatggcatatgggaaagggggaaaagaaattatttaataccggagtctgaatgccggttgtccgtaaccccagccttgtctatggcatggtttatctccctgaggtatgtgtacagtacgtcataaatcctcactttattcccgtaagcctcatgccgtttcatgtcagggataactgtttttcccacctttaccatggcgtttaccgcctcatcaaccgtattataaatcccgttggacaccgcacccagaatagcacccccggcagcccctgtctgctcacattttacagtatgaatttcgcatcccagaatatccgccttcatttgtagtatttcatttgacagggcgccccctgtagatacaattttattcaccggtacacccgaatgaatcagacatttgtatattgcatagagttccatttggattccctctacaacggcctggtataactcctcccttcctacgtccagtgtaagtcccaggattgcccccttggaacggtcatccgtatagggtattgccgctcccgaaaaatggggcagtacatacaacttcgtcggctcatattggatactgccattcagttccccgaaacatatattctggttctcctttaagacatctctgaccagccatctcaaaattgagccagaggcattgctccaggcaaccgtattatacattccttccattgcggaaggttcgcaggaaattttatattgttctaccttggactccgttagcactcccgcctccatcatcaccgtaagtccttctgttgtccctgctgcattaacgcattcccctgcccggcacaccccggctccaattgcatttgcaatatgatcatggcagcctgccaatatcaggcatgttccactgcagcccagtttccgctttatctccttgcgcatatttcctgcaacggagcctgcctgcacagtttttgacataagggattttgatagaccggcctgcgtaaacagcctccctgaccatttacatgtcctgtaatcaaacaacatggtacgcgaggcaacagaatagtccataacagcgtcaccgcacaatctatatatgataaaatcctgaaaagagaaaatcttccagatcctctcgaataatcgggggctatgactcttcatccacaatatcttactcagggaatacagagaatctgccggaaggccggtaacctccgttatgcaccgattcccgattttctgaatgaaacgcctgcattcctccctgcccctgacatctgtacctgtaattcccttcgtcaggcacataccatctttatcaacggcaatcactgactctcccatggaggatactgttatggactccacctcacatccccggcatacctcctgaatacatatgaggacagccttccagactgtctcggggtccagttccctaatccccctggccgtatgctcaaaaccatagctgacaaaccatgaattctttagatttcctgcctcatccatgcatacggcctttgttcctgatgttcctatatccactccgataaaatacatatcctcttatcccctgttctgaaacagcttaatggcatatcgggctttttccttcatcagttctctcgaatactcacaaatctcatgaaaatatggtggtttgccggaggaactgataaactgcaccagttttttcgatggctcgcaggccatatatgtataataatttatcttgcgaattcccccgtcaatgcatgttcgcgtatcctcctcattgagtccggaaccaccatgcataaccagaggcgtgttcggtacagcctccctgatggcacctaaacgctcataatccatcttcggttcttcaatatagataccatgaacagagccaaaggagacaaccagactgtccactcccgtctgttctacatatctggcggccttatcgggcttagtaaaaaaaaattccagtgattccccctctggaagcgcccttccctgcccagtcacattactgggcatctcaccatattcgccttcaactgtcacatgaatctcatggcatacatctgctacctttttcgtcctttccacattctcttcaaaagaaaaccttgcaaaatcagccataactgatgtaaaaccaaggcttaacgccttataaatatatgcttctgttgtcccatggtccagatgaagagaacagggaacagtagatttttcagcagcagccttcattaaaggtcccataagctcaatcggtgcatatggctcatgcagctgggcatggcttaatataaccggcgtcccttcctcctcagcggcttccagaacagcccgcagcatagtcaggctggttgtattgatacctgccaccgcataattatgtttcattgcatcttctaataagactttactattaactaacatatattacccctcctgttcttccagcggaagatttctttaaactcctcataaagttcgttgtagcattttccacgagatggattaggagcatacactttttcagtacggataaggctgtcagccccctgctttaatgtatggaaaataccaagcgcctctcccgacaatatcgcatcccctatgacgcctgtctcatttccacttacactctccacctcccgattccatatgtcggcttttatctgcatccacacaggcgaaaatgaagcaccgcccacggttcttattttagggatacgaaaaccgtacatctccagtatctccatgttcatccgtatatgaaaagcagttccctccatcagtcccttaaacaaatcatatctggaggtatccagggtcataccgtagaacattccctttgattccaatgaaaaacatggcgttcctgatacagaaaaatcaggaatcactataatgccggaaggctcactcgatacacatctgtccagttcctggtaagatagtccattacccagctggttcctaaaccattttattagggaaccgcttgtcagacccaacccgtaggtggcatatgtgtcccgaatgacatatggaatacagctataattgcatttcatcataaattcctcacggcgtggtccgtccatcatgacactgatggtttcgcagcttccggaaacatttactgccgtattcccatctgtcattcccgcccccagcgcacaacaccagccatcgtgtcctcctgtgattatctttgcctttccatttatacctagttcagcagccagagatgtccgtattgttccaaccactgttccggaaggaaacacctctgacatcagtcccacatcaactccagctgcctggaagatactctccacccatttcttttccaccacatcaaaggccatggtcctggccgcaagagaatggctgattcctcttactccggtaagcatgtatatgatgaaatcttcgtagagaaaatatctctctatcttgtcgtaataagattcatttttacgaatccacatcagcttttcaatactgtatgttccattgggcacattacctgtagtctggtaaatccacttctcccccagttcctgcactaactcccggctttccttttgccctcttatatcattaaacagaagcgaaggtgccagtaccctgtcctttttatccaatgccacccctgcctcaccaatagaagatacagcaatcccttctactggctcattaagctgagcggcagcagcaaacagaactttttttacctgattccagacaaccctgccatccaattcataatgccccccatgggaactataatcataatcctgtctggcaaaggccaggcgttttcccctttcattgaaaaaggcacatttcaccccgctgcttcctatatccagaccaccaaatgccatgagcccacctccgctaatctgaaaattgatatccgttgcttaagagggctattgtttcttttgccgactctgtcatagccctcttagcaatctgctctatttcatgataatagagaggtctctcaggacgtattgaatctctgatcgcatcctgtgcactggtggacacctttgtataaacattcactttggtgagaccatatgtaatcgctttctgcagctgcgaaggttcaacccctgaagagccgtgcataaccaatgcgcatcctgccgcctgatgcagttttgtcaaatggacgaaatccaggaccggctttgcaacagtcataccatgtaccgtcccaaatgatactgtcagtgcatcggcccctgttaattcgataaaacgtccgatttcctccggcttggtaaaaaactcctttaagtccaggtctcctcctgcctgttctaccattgccacattaggcatctttccaaccaaaccctctacagaaattcctacactatggcagaaggttacacacattttaacaattctggcattttcctcaaaatccaaatgtgagaaatcagccatgacagatgtgtatcccgctttcattgctttcatgatataatcaatactggtcccatggtccagatgcaggcatacagggactttggcctgctccgccatatgggccataaccggtccaaacttttcaatcggaccaaactcctcatataactgggcctgtccaattacgacaggggcgttcatatcctctgctgcctgcaatacagcctcacaggtgtcgattgtaggtgtggtaaaacctgcaactgcatagtgattgattctggcatcctccaacaatgtttttaaattcactagcatctttctctccccttccttttatactttattagctgcgcggttcttccgcataacatctatgataaccgaaatggcaacaacaagacctttcacaattagctgatagaatgaattcaaattaatgagatttagtccattgttaatgactcctatcatcagtacacctatcatagttccgccaatccgtccgataccgccagacatgcttgcgcctcccagcgctgtggcagcaatggcatccaattcaaaattctgccccagggtcggagaaccagaacccagcctggctgtccaaatcacaccgcagaaggccgcgaaaaaccctcctatgagatatggtatcatctttataagttttacattgataccggaatattcagctgccatttcgtttcctccaatggcataaagatatgtacctatcttggttctgtacatcagtatgcatattaagaccacaaaaaaggccgagtaaataacggttatagaaataccgccagacatggtcgttgtccctaatctggtaaatgtctcctcggaacaccgtacaggagctccattgcatatgacctggcacagcccccttcctatgttctgggttgccagcgttgcgataaatgccggaattttgatatgcgcaatcaagattccattaaccagcccaacaacaagtccgattcccagacaaaaaagaatgaccatccatataggatactttccggtaccgattaaagtcgcgcacacgatacctgccaatcccactgtagagcctaccgatatatcaatcagtcccagaattattaccatggtcaaagcacaggccagcatcatattcgtggatactgacttcaaaatatttaggaaattatcctttgagacaaacttatctgacaacagggacacaatgacacacagggcaagaagccccaataacggacctaggttcatttgaagccatccaagtactggattgccgtttttattcttctgtttcatctgctctccttcccgctgcataatccatgattttctcctggctgaactcagagcggctgatttcccccctgatatgcccctcgctcatgatgtaaacacggtcacacatatttatgacttccggaagctctgatgaaaccaggatgacagatactccctctcctgccagctggtttacgattctgtaaatctctgacttggacccaacatcaatccccctggttggttcatccagtatgataaccttcggcttatttgcaagccattttcccaaaaccaccttctgctgatttcccccgctcagattccctaccagctgttctgcggacgtcaccttaatggaaaatgcatccacataatgcttcaccatctcagccctttttttcttattaacccttatgcctttgatgatttccttcaaggctgccaatgtcatattaaatgctaccgaattaatcagaatcagtccctcattttttctgtcttcaggaatataggcgattcccgcgcaaatggcatctctgggccttcttatatctatttgttttccatccaggcatatacttccgctgtctgtacgaagtattccgaaaattcctttcataacttctgtcctgcccgctcctaccaacccggaaaatcccacgatttctccatatcgagcataaaaactcacatccttaaactttcgtccgcagcataacttctttacctccaaggaaaccccgccaatgagattatctgtttttatataatacttagtaagctcacgcccaaccatcatgtttatcagctgttctgatgaaacctccgaaatccggcatgtctgaatcgtatgaccgtctctcaggacagtaacccgatcagcaatctcatatagttccgatattttatgggatatatatataattcctgctcccttttcctttaaaaggccaatggttttaaacagcagatccacttcatggtccgacaaagatgatgtgggttcatccatgactataattctggcctccgtagaaacagccttcattatctcaaccaactgctgcataccgattgaaagatcctgtatcaatgtatctggtgacagatttaaaccaaattcccgaatgattttatgagtctcttcatacatttgcttcttatccaggaatccggccttgcttttcagttctctgcctagaaacatattctcagttatagtacgaaacggtaccaggactatctcctgatgtataattcgaatctcattcttctgcgcgtccatgacagaatttacttttacttcttttccctgcaaaaaaatggagccgctgtctgctgtatagattcctcccagaattttaatcagggtggacttacctgcaccattttcacccagcaatgcatgtacttctccttctttcaaatccagattgacctggtccagtaccttcacaccgggaaacgatttacaaatattctgcattttcaaaagaaccatatcagccatcctatatcacatcctttttaagcaaaagggccgacgatgcggccctttctacactatctaaacgctgcggccattaaggaataccaacatagcctctttcaccttttcctccatgatttccattgccagtttagccagtctcccataatgtaccggagttcctttggcctgttcaattacatccagtaaaactggtgccggagctgtatccatagctgtaaaataattaatctttctgataccggcatcaatggcacggcgtgtctgttcctcacccgttccggaaccaccatgcatcacgagatccgtctctgccggtattgcacttctaatctgtttcaccctgccaatatccaaatgaggttccccttcatagctgccatggactgtcccaaaagaaatggccaatgcatccacgcctgtccgttctgcaaacagggcagcttcctgcggattcgtaaaatatgcttccatataacttaaatcgcttttttccttcccatttgcacagcccgccatattattaggcatagctcctatttccgcttccacagaaatcccaaggggatgggccagtgctacaaactgtttcaccctgcatatatttgtttccagagacagggatgaacaatcatacatgatagaagtaaaacccaaccggattgctttcatcagatatggaaatgtctctccgtggtcaatatgtacagccaccggtacccgtgcatttttcgcatactccaccatcaacggggcgataatctcaatgggaattacctcttcttcattctcggcatggttaaggataacaggggtgcctaaggtctccgcagcccgaatgacagccctcagtgtttccagggtaggtgtattaaaagaacctactgcatatttgtgctgttcacaatcctttaaaatatcttttaagttaaccagcatatgacatctcctttactgccatccgtcaattccatattcctgtacattttctgctgttatgctaaatgcctctatggatgtattaaattcaaccttctctcccttaattaacttaaagcagttttccgccccaattcttcctattcccagaggtgactggcctgaggactgtacaaaaccgtctttacccaacaccgctttggcatccggtgaaccgtctttaccgtaaacagcaatctctcctgcttttcccgcttctttaatggcttgaatcacaccaaacgctgactggtcatttacacagtagaacaggtcaatgtcatcatgagcctggagtatatctgtagcctgtgtaaatgactgctccatgtttccttttccatccgcctctgccacatttacatatgcctcaggattctttgcatgttccttgattgcatcccaaaatgcatttactgtaacaatacaggattcagatgtgggtgaatgcatgatgccgattttagctccgtctggaaaacgttctgcaacatcctgtcccgatacatatcccagtccgtaattgtcagatgccacaattgcatcaaccacatcgtaatcattttcattgaccacattatcaatatttaccacataaacaccagcatccttacatgcctgcatgatattgcggctgccggctgagtccactggtataaacagcagggcttttatacccatgctaatcatgtcatcaatctgagctgcctgcactgatgcgtccatctgtggatcaaatttaaccagttcagcaccatgttcagccactacttcctctatggcgctgcctacagccgagaaatagggattgaccatcgtcatgggggaatatcctataagtaccttctcttctgttccactctctgctgtcgtttccttatcagacgcttcctgtccggaggtttctgtcgctgactctgcagttgttttaacagcttcagtttcctgcttttcagttgtttcttttgagcttccctgactcgaacacgcggtcagtgccataataagtaataatcccatagacaaacatttgaatcttctcattttctacctcccgtaccttcttttaaactatctgtctgttgtatgttacacttttagtttatcattaaaatatcacaaattcaacatatcttacagtttttgatatcatatatgttatatttatgatataattttattttttatgatatttaaatccatattttttatttattattgcatttacaatatatttatgataagttagcaatgagataatttattatgcattttcacgagggggtgctgccatgcgttcatctaatgaagcagtgtcgcagagaagagataaaattttagattatatatcagcaacaggaagaacttcaaccgagattgtagcaaaagaatttggagtttctgtcatgactgcccgcagggacttgttatatcttatggaaaaacggttaatcagcaaatcttcctctggtttattcaaagtagataataatactgtctttatgaaagatttcaacttccggctcaaacaccatctggcggaaaagcaggcaattgccagagaatgcctgaaattagtcagagacggggatttgattggaacggacgcgagtacaagcgtcctgaccctctgcaaaatgcttcccacggaatacaagctgacattagttaccctgagccaggttcttcccatcgtaatggagaaccactcaaatgcaacaattgtatctacgggaggaattagtctgaagggacatgcatcttatgttggctccatagctctgtccacgttatccgcctttcattttgacaaaagctttctttctaccagcgcctttgatcctgctctggggttatgtgactactcagaagaattgagtaataaatccaaacttattgaacagtccaatgagacatatctgttatgtgacagctcaaaatttgaaaaaaaatctctccattacttgtttatacccgctaacataacggccatcatcacggactggaaaatatcccaggaacagttggataaccttcgccgccacaattaccatgttattgtggctcctgaactatagaaaaatgaattaaagtctgctatactatatcaatgtgttaaaactgtactattatgaggagatttaccaaaccatgaaaaaagcagcaaaattcgctctgataaagaccatccccatattcctcggctacctgttcttaggaatcgcctttggcctcctgttgcagaaatccggtttgggtgtgttctgggcctttctcatcagcaccctggtttacgcgggttccatgcagtttgccctggtgggcatcctcaccggcggcttaagctatgtgaccacggctgtcatgaccctctttatcaacagccgccatgcattttacggactcaccttcatcgagcgcttcaaggaaatgagaaagacctatccatatatggtattttctctgacggatgaaacctattccctgttatgttccatggcccgtccgtctgactttacagacagggaatggaaggcagccaccttctttacctctttttttgatcagtgctactggatagccgggtccgtgttgggcgcccttatgggtgagctgattacctttgacaccacaggcattgattttgccatgaccgccctgtttgtggtcatatgcgtggaccagtggaaggcggcaaagacccatataccggctgtcaccggttttatatgcggcgcactgtttctggtgctcatccgctcttccaacttcatccttcctgccctagcagctgccgtagccatgctgctgttcctgcgcaggactgtggaacagaaaatggaggaggattaaaccatgacccaatcaaattatgtactaattaccatactggtttgcgctctgtgcacccaggtaacccgttggcttcccttccttctctttggcggtaaaaaagaagtccccgggctggtccgctacctgggaaccattctcccggccgccatcatggccgtgctggtggtctactgcctgaagggaatcacacctttagcctacccttatggcctgccggagcttatatccgttgccgtggtggtgggactccacctctggaagggaaatacccttgccagcattgcgctgggaacgttgtgctacatgatgctggtacagttggtattctgatgaggctctgaccatgttccggctgtactctgaccaacccatatataaaagcctgttcacgctttataatgtgtgaacaggcttttctgcatcattttattttataataattttatttcatacccattttatatgcatttattaaatctctgcatccgtcccttccggctccctgctgcagacgtcattcccatcgttcagcgcaggcctgatcattccatccttcagcaggccgatgaataccggcaccagctccggatcaaactgtgttcccgcgccccgttccagctcattgacagcgaattccaccgacatgctgggcttatagctgcgcttggataccatggcgtcaaaggaatctgcaatacaaaggattcttgctgccagaggtatatccttccctgcgatgcgcctgggatatccccttccgtcataccgctcatggtgtcccagaacagcgggaatcacataatccatagaggggaggtggcgtatgatttccacggatgcctccacatggcgtttcatggtactgtactcctcatccgtcaattttccggttttattcagtatgttttccggtatccctatttttccgatatcgtgaagcagggccgactccttaagaatctcctggtattcctcgctggttttcagggcctgtcccatggcatgggcataataggccacattcttggaatgctggaatgtataatggtcctttgcgtcaatggcagctgtcagggcatagatggtgggagcatactcagaatacatgcttcggtgcttctttgccagtccctcgtctgtatccctcaccccgatgattccgtccgagtatacccggattccgttctttccggaacgcttcacatggtataccgcacagtctgcgttggatatgagctcattcatggacgcggctgcgtacggagccgcgcagattccgcagctgacagtcaggggctttaagtaagtgtctgtacagtccagattcatattctggatctgccgcgaaatgttctcagccaggttctgcgctgaatagatatcataatcaggcaggatgacggcaaattccttgccgctgtagcgtccgcagtagccgttatcccccacagtcccctgtatgatacgcgcaatatgcaccagtgccttatctccctcatgattgccgtaaagctggttgtacagcttaaaatcatctacgttgaagatgacaagggccagggaggtacgcctgcatttttcgtaattttcctccagtgtctggcagaaatatttccggttcaaaagtccggtaagctcatctgttctggcttcctcatatgccttttcatagagcctggagttcttcaccgcaatggagcttacggattcaatggagttaaggaatatgatgtcctcctcggaatacccctgggtacgcatctttccccgcttctccctgcctcctaaaagcaccagtccggccaggtcgttcccatccttaagaggcagaatacactcaatcttaaggacctccatctggtatttttcttcctcccacatggacttatattccacggtcctgcggaaatccttaagcagcagacaggaatcatggcttttaagccagttgataagcggcgcgctgccggccagagaaaaattcttgtcatccaggggactgctgctgaatacagccggataattcccctgggaatccctgatgcaaatataaatcttccttgtgtgcagggtatttcctatgacgttcaccagggcattcaggatttcagtcagtctgagggattgggacacaatggcggtgtattcgctgagccgttctgtctggctcacctcctccttaataaaaatccggtcaaaaaatcctttggccaccatgtaaatcagcagtgtgaccagcatggtcatagtagccacaatcatgacgctgaaaggggccagcattggtatatccctgcggatgatgccgtccagggtctgggccacattgtaaaaggccagggcgcttactgccatggcaatgatgtagcagttgcctctggataccagcagggtcatgcggaacacatgcctggaataaagcgtataaaacatcacccctgcattcagcacccctgacagtatatcaatgggaaatccattgaacagaggcacagccatattgcctgcaaaaagcaggagtatacctgacagcagcggtaccaccttggccttcagggccctgtttttccggctgctccatatgatggcggccgtatgtatgattaccaggaagcagagtccgtacataatgctggcacgccagtccatatgatagacaaacacggcgctggctccattccactcgatagcaggcggctggaccaggtttcctgtccatatattatagaggttcaccagaaggataagcaccagccacatcctgtgggagcttttcgccttatggccgcagaaatccctgataaagcagaaaaacgcacacggcaccaagctgattcctgccagcgaaagatgaaaccacagctcataggacggccaggcccgaagcctcatcaaaagggaaccgccggtccacagaatcatggcgcccagcacagcgataaaatcacgaatcagccgtgatttcttagccgacataaaagccagcataagaaaggtatagaaatataaagctgttatggatataaaaacatagcttctcatacaatcagtatctcctaatatctcctgtgcccgtcaaaagccgcctgcatctttatcatttcctgtatatcgtggatggacgggttgatatgccgcagtgtctttcctgtcttttcccgataggaggcaaaggtgccgcaccgcaggacagttatctccagcgggtccatacccagtatacgtttcagatcatggtaatcctggtccacgtatttaaaataaatggtcaggtgttccttcagaagttcccggcttacggcccggttcaccacgcagcccggcgccagctccacgtacatatggaggtatggcctccctctgtcctcagtaaactccttaagggctgcccagtccgtcacatcaattccggaaaggctgataacattcttaatggaattttccgaaatccttgtaaaaccggcaatatcaataatatccggtacccggtcaatgtactcaaacctgggaatccgtgtctcatcctccttgctggtaagtcccagacagcggtagacatcccccacccggtaccgggcaaatgccccgcctttcagcacggtaaggacaatttcatacacctccccggctgccacctcatccatacatatggtcctgggaacataggagggatcatccagattcttgtacatttccgcttccggtataaattcataaaagcatgcatctggaaaaaagtacagtccgttgcggttccatgtctctgtcccgataaaactgggctctgtccccgcaaacacctccacgggcctgatgccccacagctcctccaggtcatctttatagcagcggttatctgttccggcgcacagaaatcccttcagcctgaacagatccttgggcatcaatccccgtccttccttttcacactgtttcttagccttaagataccgcagggtcatggaggggggcatggtaaacagctttttaaggaaagacccgcccttcttaccgccctcggacagactggcaatactcatactcacaaaataagccacgctgcccatgccaaagaagaagtcaatcccctttcccagccccatcttgaatcccttcttattccgctcggaaaaggtcatgtttacggcctcgtccaccggaggaagaaactctatatggagctcgtccgacaatcccaggggaatcaggcccgtgatatagggcaaaggcgccaggccgtataaaaatgtatcgccgattccgatgtcaaaacttcccctgcccttgctggttgccatcatcaggcaggtaaggatattatttttataggtcttcagcatgccgctggtgtagggcgccaccttaatgggatgcttgccgccctcccaggtggtctgtatccatataatgggtttatcaggaagcatgtcctccttcttaaggagaagaacatctgcataatcctcataggtagtcaacggcaccatggccctaaactcctctatattctccggcctcttgtcctttagaattttctttccaagagggctggcgcaccagagtcccatctgctcctccaaaagccttctctggattttcatataagacgccatgtccaggtccagaaatccgcagtattcctgccatatcctgtcatactcctgattggtcagcttttcctcaaatgtcattctgattcaccgccttttccacagtctgggtaatagaaatggtacctgttcctgatactccctgtagtcagaaaactcctctacaaatataagcctgtcctgataccaggcatacaaaaggttcagcaaagaaaggcaaagactgagcatcacccggttcagctccccggtggacaggcccgtacagaaaaagcagccaaaaaaccaccagatgcctggatgacggcaccagccatacatacctgagcggcagaccttgtgccgatccgcctcctggcagtatgtattgtcaaagggcaatgcaaaatacagtgtataaatcaatacagccagaaaaaatgcgccaggaaggagccatacagattgttccttaattcctgaggagacgcaggcatataccattcttcctcccaccacagccagcagcaggttccctgctgcaaaaagcggtacaaaccactttttcttcaaaaaaacccgattccagtcatacaggaaaaacattccaaaggcccctaatccaaagccccaatccaacacctatatccccccttccccatatataaaagggagtccgctctcttcatgattccagactcccaaccgtatctaaaataaatcctcccatctgttctcaacctttgggaaattatgtaaagtatcatgtaaatagcaactatttgccgaatagtataaattctatcataaatatgccgaaaaaggaagggatttgtccaggtattatttatcttttcttataaataattaggttattttgtaatcatgctaaatttattgttttttagatacaattattctcccctcgcctgtttaaagatactcttccaggatgatgattgatatggacatttacaagggtaaaaggataagttggattgtggcgccaatgctcctatggctgcggcaaaaaaagagacagcccaggctgtcccttaaaattcttaccacataaaattcctatcccttaaaattcctatcccttaaaatccatttctgttgtaaactccttgccgcaatatggacaggtgacacgaaccacaggtccttctaatccgtttagggtttcgtacatctcctgtaagaatttcaaatcagaagcaaacaacttttctattgtttcaactgttaccagcggaagactgcccagttttataataacatgggataatataataattgccgcataatccgggttctgcattacccttgggtccctcattgctcttatttcgtccattgctgttgccaggcgcatgatcccattcttatgaagatttccttcctcatccatgtaccctttcggcaaagtgaattcgtattgtgtctgcagcataacctctcctctccttgcatgttaatatttaaaatatactaatacttccaatatgtaccatggagaacaaaagaaaaaaagcctggtaaataccaggctctccacaagctgctgacgggaatcggacccgtgacctccgcactaccaatgcgacgctctaccgactgagccacagcagcttattctgttttggtgcgctctcgcgaaccttgtatatattatcatgtccgtatggttttgtcaacaataattttcaattttttcaaacaattcaccaacggttctttcttgccttctctttcttaccttctatccccgccagtacaaaccgctgctcccgcaagccttcccggcaatcatgagcagcagtctgtgcggcggcttcccaaaagattctaaaaaatcgaatccccaatcaacccttttccatatatcagaaaatcccgtcatatccttcacgcagcgtatcacaggagcggcccagcttctccagctcctccggtgtcagggacaggggaaggaccctctgtaccccgttctggttgataatacagggaactccggcaaatacgtccatctgaccgtactctccccgcagcatggcggatacggtaagtacgctgtgctcatcccccagaatggccttggttattctggtaagggccatgccaatgccataataagtggcactcttggcctctatgattttgtaagcggccgtgcggacctcttcctcgatttcatcaaaccgctgccggcataccgcttccccgttttctccgcacagttccagtatgggcttggtggccagcagtgcctggctccacggcacaaactcgctgtccccatgctctcccatgacataggcatggacatttctgggatccgccttcagataatcgcctaacaggtatctgagcctggctgtgtccagggctgttcctgttcccagtacccgtctcggattaaagcctgacagggtacaggttatcctggtcatgatatcaaccggattggttgccaccagaaacagtccgttaaagcccgatgaggtaaccggctcaatgatggagcggaacacctcagcattccttttcagaagatccagccgggtttcaccctgcttctgggccacgccggcacatatgaccacaatatccgcgtcactgcagtcgtcatactcccctgcatatattgtcatgctggaattggcaaatgccaggccatggtttaaatccattgcctccccctcggccctcttcttatttacatcaatgagcaccagctcatcacacaccgattgattcagaaggcaataggcatagctcatgcccaccattccagttcctacgattaccactttcctcttatctgctctcacgtgctgctcctttcccaccgtcccggtctgctgttcataaccttagtatatctggaaaacctgcgtcttattccggcaggattcccaattggtttttccaggacctccggcaggtccggcggctacctggccagtttcttttccattaactcgctgttgctgctgtaagctatcgcattttcacgtgaaatcactccgtcacggtataatttaataaggctgttatccatggatatcataccttcctcctgggaggtggcaatgattccgtctatctggtgaatcttggattcccgtatcatattgcggattgcattgtttaaaaacataatttcaaaagctggctgcaccccgccgtctactgtaggtatgagctgctgggatataaccgcatccagcaccatggccagctgggtccttatctgctgctgctggtttggcggaaatgcatcgatcacacggtcaatggtattggctgctcccacagtatgaagggtggagagaatcaggtgccctgtctccgctgctgtcatggctatgctgatcgtctcataatctctcatttcacctaacagaataacatccggcgcctggcgcagggatgccctcaggcctgtgacgtagctgtccgtatccgtaacaatctccctctgggtcaccacgctctgtttatgcctgtgcaggtattcgatggggtcctccagtgtgatgacatgggcgtttctggtgctgttgatttcgtcaataatacaggccagggttgtgctcttaccgctgcctgcgggtccggtcaccaggaccattcccttggtaagcctggatacgccgatgatgctgtccggcagatgaagctgtccggcatccggcagctcaaaacgcaccacccggatgattcctgccagggagcccctctggcggaacacactggccctgaaacgcgatacccccggtatggcaaaggaaaaatcatcatctccgtgggactggaccttatccatgccccggttctttgccaggccgtatatctcggtaatcatcttgtccatctcatcgggcatgatccggttgtcaccctgatagataatccggccgccaatcttataggagaagggcatgcctggtataagaaatatgtcagccgcattcttctccacggccgatgtaagcaattccatcacattcatctgttttgctccttttgcctctgttttattcctgggacggggctgctccgccccacacaggcatagaattatctatttcatactcatcactggcatatacataccatgactttatatcgtaatgcttttccccgcacatgagaaccagctcaatgcgcagagactgtcccctgtccatagggatgtccgtggaaataaggccggtttccctgttgtaaagctctcccagcctgtccttgatatccaggctgcactgggtggaatcctttccctcccccatttcctctgtcaggacctggtccacttccttaagccactgctgccccctgctgtccgcctcataataagcctggaccgcctccccattgcgcccggccagctttaaatcgccctgggcgctgcttaaggacagcagtccaaaggttgccatgcacagaacgatgaaaataagaatcagggacgacgcccctatattcactttattcctggatgcctctcctgccatctgtctttcctttccgtgtttcattttccctaaatacggcggtacacagttttaggggccggcataggtctctgtctgcagccggtacagcatctttcccttattggcccctctgccgtagcgcatgataagtatgtctgcccgctccatcttatccactgttccggtgtatatgacccccaaaaaggcgggttcactgtcaggttcagtttcctcccagctgctgttccagtacatggtatggattccttcgtagccttcgctctgtaccagctcctggttccactgaacctgttcctggtttccctcatcggcatctgccaggtgttcccatatgtttcggtccggcagcatctctgaccaccgcagagcctgccccgccttaagctcttctgccagactctgcgccttaagcaccgcctgatttatgtcccgggcatctttgcttatgttgtcagccttcacaaacaccagaacacagatactggcgcagatgatgaaaaaccccaccaccaccagcatttccattaaaaatggccctgaaccggacccgctttttctattcatccgtctcaagtcctccgctccgcagagaaagctccaggcttccgccgccctctcccacggtctctatacgcagcagcctgccgtccttagaaaacttcaggccctggcattctaaaatctccagaccgtccgcaagccccagaccgctggaggtgtctgtaaacagttcccggatgcttccatcgtcccagtaaatccatgtgacgtattctgaatccccaatctcctgtttcatctccagcacctggatcccatccacatccgccacatttaccatcccggcccggtcgccctggcgcaccttgttggcaatgtagctgagggctgtgttgcctgtataattggcatcgctgcgcacattgatattttcatatacccggctgccaatcagcactgtgaaaagggcacacagcacaaataccagaaacaacagcatggtaaaaagcacgctaacggcattcccctttttgtctgttttccgattcataactgtatgccccctactcgtctatgggtatgatggttatttccggcatcacattggacgcgaaaccatcgtaaaacacattgtatttctttctgttaatctggaccgcgtaattctcctccagatattccacgctgggcggataacggccctcaatggcatagcactggaccgaagcccttgccactgcctttctgagagtctcctcctcccttgcgcctgtcctgcccgaaaaattcagcacagcggcagcaaatagtgccaccatggcagccagggctgccagggacagtatgtaacccagtgcctggctcttctcttttttctcagacttaaccttcatttactgcctcctaactgttatccgatagcggacaatacgcccaccagaggaagcatgacggacaaaaggacaagtcccactgatacagccaggactgccacaatggtcggttcaaacctggcaatcatatcatcaatggcagtatcagccatctcctcataatcctgggatatctcatccataacgctgtccaggtggccgcttctggttcctactttaatcatttgtacataaaaaccggaaaacaggccggtatccttcatggcctggtagtagctctcacccatctggagctgttccgagcatttcccgatgcggactgccacgctttcattctcaaccagctcctttgccaggtccatccccttttccagctccataccgctctttaaggtcagggccagcacagcccccgcaataagggctgcgccgcttaaccagcctcccagcctcatggccgaggctgccacaggcggcatctgggcccccagctgctcatataccttgttgaacacgggcatgaccttggaaaacagcacaaagaggaccaccaaaagcattaccaccatcatcacaggatatgtgaccgcattctttatggcccgcaggagccggtattccttctcatagtaatcggacagcgatttcatcatctggtccatggttcctgtctgctgtcccagcttggccatacgcaccacataagccgggaatacacccgtatcctccataactttgaagaagggatctcccagctccacgccctctgccatatacaaaagcatatccttctcgccctgcgaggctgcatcctcagccataatggccagcccttcctctaacggaacagctgcttccagcagcagagatatctgcagacagaatgccgacagctcctcataggaatacctgtaataagcctctccctttttcgccatctcttttgcctccccttaatagctgtattttgccctgtagttagagccgtttccaatgtactgcatgatttcctggctctgaccgctggaggacgcaaaggtggggtccatcagtttccagctgttgccgtcaaagtagatgatattatccacccatccctggccttccagatatacattaatccatgcgtgatacagattccccgtatagcccactaccagcttggtaggaatgtcctgggatctgagcatggctgtcataagggccgcgtagtcaaaacagattccctttttctgcgccagaaccacatccacattgggcagatagccggactggaccgaacttgccttggccgtatcataggtgacattgttgattacatagttatatacgttggacaccacttccaactggtccgttgcgctggcagccacggatgcgcctgtctgcaccgctgcgctggcagcattgaaattcacatactggttggggtacaggaatggtccgaactgattggttatagtggcatttacattctggctgaaggcctgggaatactggtttccctggatattttcaaacaccttcaccgagtagctgccgctgccctcagacagagggaacacctcgtatacgccgctgctgctcaaatcatatgtatatgtctcggaaccgctttttgtaatctggaccttaatcttgcccacgcttcccgtgtactttaccataatatacccctccgacacattggatgcgtccagggtagccttctcattgctgtatgtagtgactccggaagcaatgggagtcagtacatgacttccggcaggctttgtgtaggccagggccgtcaccggtacctggatactgctgacggcaaaaaaagccgctgccgctgccgctgcaagctttacaacaggtttatatgctgtcttcatatcgttatcactcctttttctctaaaaggactacatctccaggcgctgccttacaatctcataggccagcacgcctgccgcaaccgatgcgttcagggaatcaatatcccccttcatgggaatggacgcaaccatatcacagtgctcgcgcactagcttgccgaccccttccccctcatttcccaccaccagtccgatggaacctttcaggttcatcttatacatgagttctccgcccatgtcggcgcagacaaaccacatgccctttttcttcaaatcttccatggtggccgtcagatttgtgaccttggctaccggcgtatagtttaaggctcctgccgatgtctttgccacggtggctgtcagtcccacggcacggcgtttgggaataatgacgccgtgggcccctgccaggttggccgtacggatgatggctcccaggttgtggggatcctctatgccgtctaacagtatgaggaagggcggctctcccttttcctctgccgctttcagcatatcctccacctcagcgtactcataggctgccgcataggcgatcacaccctgatgctttcctgtctcggatatctggtccagcctttcctttggcacgtagttgatgatggtatcgtatttcctggcttccctcaggatggtgcgcaccggaccgtcctggcagccgtccagcacgaacagcttgtcgatggtcttgccggaccggaatgcctccagcacggcattgcgcccctctatggtcagttcttcgtatctcatgtcttatctccttccgggtccggcatcctgcccagcttttcaagtccctggcttatcagagataccagcctgttgtattcctgcctcaggaacagccaccctaccagggcttccattcctgtggccatgcggtaatcaatgacagaagcgttcttggctgttgtggctgattttgcattgcgcccccgcttgaacacggcatgttcctcctgggtaagcatgtcctcgatggcctttataagctctgcctgtgtcccggcctttacaagctccgaactctgcttatgcattttattcacctgcatgctgccccggtttatcacctttgtgcgtatgatgacctcatacaccgaatctccaatataggccagaaccagtggcgagtaagaattctcatccactggttcaagcctcatgcactgtctataatatgtgagaaattcctgaatggttacgctctcttccactttacgccctctctggtgtcctctaatacaattcccatatccagaagctttccgcggatttcatccgccagcgcaaaattcttatctttcctggcctgctgtctggcttcaatcatctcttcgatctcgctgtccagcacttcttcctttttctccgtgataatgcccagtacatcgcacagttcttctatcattgtcttcatataagatacgaattccctggtaccggattcatctgcagtggtatttgccagctttaccagttcaaatatggctgaaatagcgtccgcggtgttgaagtcatcatccatggcatcctcatacttgccccgcagattatctgcctcttccatagttgcctgctccccggcagtcttggagctgtcggaagcctttgcctccagatcccttaacttctccacacaggtcaggatacgctccaggccgttcttggaagcctccatcaggtcggcgctgaagttaagggggctgcggtaatgggcgctgagcatgaagaagcgcagtacctgcaggtcgtatttttcactgatttcccttactgtaaagaaattccccagggatttggacattttcttattatcaatattcaggaatgcgttgtgcatccagtatgtggcaaagttcttgtcgttggcgcactcactctgggcaatctcgttctcatggtgagggaatatcagatcctcgcctccggcatgaatatcaatctgctcgcccaggtagcgtttggacataacggagcactcaatatgccagcccggacgtccgtcgcaccatggcgactcccagaaaggctccccttcctttttaggcttccagagcacgaaatcgttggggtcttccttgccttcctcaccggtgaccttgatttcacggaatccggactgaagctcatccaggttcttatgggacagctttccgtattccttaaaggaacctgtcctgaagtacacggtcccgtccccggccacataggcgtggttcttgtcgataagggtctgtatcatctccagcatgccgcagatttcctgggttgcctgaggatggaccgtggcaggctttacattcatggctgccatgtcctttttgcactcctcaatgtaccggcgggacacagtgtcagcgtccacaccttcctcaattgccttttttatgattttgtcatccacatccgtgaaattggacacatagcgcacgtcgtaacccttatactcaaaatatctgcgtaccgtgtcaaatacaatcatgggcctggcgtttcctatatggatgaaattatacaccgtagggccgcagacgtacatcttgacctcccccggggtcagcggaacgaattcctctttttttctgctcagtgtgttaaatatcttcatactcttattctcctcaaatgaatctcttgcggcatgtctggaacataccaggtcagctgtgtcagaatgtgttttatcctgtcttattcttccttcgcccggctgcagccaggacagcctccacagccgccttccattatcttactatcatagcagtaatctgctgtttccgtcaataaggtaattgcctgagaagagattccttctccggttcctgtaaatccaagcccttcttcagtagtggccttgacgcttaccctggacacgtccagatggagggcgtctgctatgtttgccgccatctgcggcctgtattgagccagcttgggacgctgggctatgatggtggcgtctatattctcaaccacgtaccctttcccgtccagaagttctcctaccttctttaacagttctatgctggaaatacctttatatgccggatccgtgtccgggaaatgctgtccgatgtctcccagggctgccgcccccaacagggcgtccatcaccgcgtggaccagaacgtccgcgtcggaatggcctaagaggcctttttcatatgggatattgacgccgcctaagattaggtcccggccttgtactaatttgtgaacatcgtatccttgtccgattctcattgtgtctccttttttactgcgtctgcgctactccgccatgcacaccgtgactgcgctgcgctcattgcctgcgtcatatcatcatccttaccttcctggctatgcagctggcttggatgtcggtctgaaagccgcagctttctccgtctgcatggacgggcagggctgcttccgtgtggatggatacttccctgcactcgtaggttctgacacctttgggccggcgccttcctatgagggctgacagcaggacgggtatcagctttgtcctggtaccgtggctcatgacgcagatgtttaattttccgtcgcttccgtctgccctgggggcaaagaggaagccgccgccctctgagggctgtatgtgacaggatatgaaaaggatgttgttgaactccaccttttttaccccgtccagtaaaatgtatcctttgcaggatttgcatttaaaaaactggtgtatacctatgagtatataagaaagtttccccatacccaaacgatttaaacgctggcggcatctggaggacagggcatcctgacagactgctgcgtcaaatccgattccggcgctgaccagaaaccggcgatgggatacctcctgatttccataggtaaggactccgtaatcaatcatggtgaaatgccgggggaccagctgtttcttaagacactttatggtgcgtccgggcatgcgaaggctcctggccagatcgttgccggaaccggccgggatgtagcccagacttaaaggcccatggaaagacacaccgtccagaacctcgttcatggttccgtccccgcccacggcgatgatatatcttggctcatcatggctgtctgtcagccgcattgccgcggttcttgcgtccccaatgccttctgtcaggaaaacttcgtattcaatattatgactttccatataacgggctatggctttccagattttaagacccttgccggagcctgctttgggatttacaatgaagttatacatgaaggattcaggtcgtcctttctactattttactctgccttaaattatagcataataccctataaaacactaagaaaatttctataaaaaaagttgtaaaaaaagtcttgacaattaccacaatttatcatatactgtacaggcagtcgcgagtgagacacaaacgacggcaggatatggggtcttagctcagctgggagagcatctgccttacaagcagagggtcacaggttcgagccctgtaggccccactatctaccaaattaaatatggcggaatagctcagttggctagagcacacggttcatacccgtggtgtcgagagttcaagtctcccttccgctactcgagaagctttggattgtcaaggcttcttttgttttgtcgccgggtatttgcctgccagggcgttttatccgtctcaaatctgccagggaggacacaagcatcatggaaaaggaacaaatctttcaaagaaacgcaggatttctcgcgttttttctaagcggcatatgcgccatcagcagcggcgtggtcgtaagcatgctgcaggagacctacggctttgcatacggcatgacagggacactgctgtcccttatgagtattggtaatctgctggcaggttttgcttccggcatgctgcctgcgaaaatcggaaccaagaaaacagtggtgctcctgacagcaggctatggagccggatatctgatcatgggattttccggatggatgctggttcttatgctgggctttttcctggtgggcgttgccaaaggaagcaccatcaacacctgcaccatcctggtggctgataactccggcgaccgtacaaagggcatgaacattatgcacagctgttacgccctgggcgcgcttttgtgtccgttcttcattggcgcggccatgaaggcagggaatgccgttcccatgctggtgttagcatcctgcggtttcctgctgtggctgaccttctgtgtgactcccgcggaaacaaaggccatgaaaaaggacaggagcatagataagggcttccttaaaagcaaaaaattctggttgctcaccggtctcctgttctgccagaatgcggcggaaaccagcgtaaccggctggatggttacatattttaaaggaaacggcatcatatcaggttccctcagtccctacaccgtgaccgtgatgtggggcgccaccctgattgcccgcctgctcatagcatttgtaattcctatcaaaaacagctattctgccatgattaagatgggtattggctgcatcattttctacctgggcctgatgatggccggtacccagaccgctgccatcctgctgctgttcgcctttgcctttgccatggccggcatgaatcccactgccgtggccagcgcaggccgtatgaccagtgcggccagcatgggaatcatgcttccggctgccagcagcggcgctatcatcatgccctggattatcggcatggtggctgaacatgcaggcattgaaatcggaatggcttccaatatcattccctgtgcaggcatgcttctattcagcgtggctgtaaaacgtctgaaagaataggagctgtgaagccatgctctacgataaggatatacgggaacctctctttgattttctggaggagatgtacggaaaaatacgtattctggaagaaaaacagataggaaaatccagggcggatatcgtcatggttctgccggacctggtggctggtatcgaaattaagagtgacgccgacacctatgcccgtctgaaacgccaggtaaaagactatgaccagttttacgacaggaattatgtggcggccggctccagccatgccctgcacatcgaagaacatgtccctgaatggtggggaatcatcaccgtggagcaggtggccggacaggcggatttttatcttctcagggaggccaggccaaatcccggggtaaatctcaggaaaaagctcagtatcctctggcggccggagctggcccatatccaggaattgaacgatatgcctaaatacaaggaaaagagcaagcaattcgtcattgataaaatcgcagaaaagatacctgaagaaatactgtcaaagcagataagcggcgccctgtttgaacgggattataacgaaattgaacatgtgatacaggaatttaaaaagacccggaccgctggcaccaggaaagggcgcgccgggcgcacccgaaaaggcagacgttcatgatacgcctgccttttcctgatccgcattttattggtctatattacctgttccacttttctattccgcttttctattccgccttaccatccagataatccagtatctcctgggcattggtatccggctttgctttttcaaacaccttctcgatgacgccattctcatctattacataggtacttctcaccactcccatggaaaccttgccgtaaagctttttctccttccacacatcgtatgcctggatggcagtaagctccggatcggacagaaggatgaagggaagttcatgcttggcggcgaagttggcatgggacttctcactgtccctgctgacgcctatgacctccacgttcctctgtttaaatccaatgtacgcgcctgcaaaggcacatgcctccctggtgcatccgggcgtgttatcctttggatagaaatacaataccaccttgcggccaagaaaagaagacagtttaacttcctttccgtccttatcttttaatgtgaaatccggtgcctttatccctgcacttaacatgtcccgtatcctccttaagcaattggccagactcacagaacgcgcactggcctatgagattatattattgcaggtatccgtgcttgtcaaggactcctctaacgcattatgatttccttgaatctgcggacaaattcctcagcctttatatcctttgcacactgcacattctgtctgctgtttcccacccctatcttccatgtattaaaggtggtgcctctggtatgctgtccgtgaagctccacatggatgtcttccccctgataggttatgatgtctttatcgtacaccgcaaaaacagccatgggatcgtgcaggaaggtgtggcgtccccggttctcgtaatagcatgtgagcaggtctgccagcagctccacttccggttttttgctgtttcggaacatggttaccaattggtcattcacctggcatctggtggtcacatccagtcctatggcccggatgggtacaccggaggaatagacgatatgggctgcttcagggtcgcagagaatgttccactcattgtaatgcatatagtatgcgccgcccatcatcacgatttccttgattttccccttaacctccgggtacttgcaaagcaggacccccacattggtcagcggacctatggtgaccagggttatgtccccctgtgacgcagacaggctcctgcgcagatattccaccccatccatgtccttccggtactccagctcttccattcctgccagaagctgtataggcaccgtctccacatccgcctctgccaccagcggatgccctatccctgcgtacaccggtatgtcggtcctgcccatgagctgcagaagccttaccgcaatctgcgccctggccgccgtgttccgaaatactgtggtgatgcccataacctccagttcttccgatttaagggccagacagatagccagggcgtcatctgcatcgtctcctatatccgtgtcaatgattatcttaatcttatccatattcttctcctttttcataacagtccacacagcacctatttattacaatcgtttcattccttcatacccgatgtactgattcccattttataatatttctgcagcggaaagaagaacattaacggcagcaccgtggtgaccacggaagctgcaaatatctccccccacagagttccgttttcctgctggaatacagacaaagccacctgtacaacccgcacctccggggcattggcagcaatcagaggccatacaaaggactgccattgatagaaaaatataagcaggcccgcgctcaccataatcggcttggtcaatggaatatagattttcgtaaacacagccagccagctggctccgtctatccgggccgactcagccaggctgtccggtatttcctcaaatgcatttttaaataaaaagatatatgtaccgttggcaacagccggaaggataagcgcgctcttggtgttcagcatgttaagctgatggcacagggaataaagcggtatggcaatggcctcaaagggtatcatcatggtaagtataaccataagaaacagcacatgcttgcccctgaacctgaattttgcaaatgcaaaccctgccagcgcattgagggccagccccaggacaacggttaccgcgcacaccaccactgtattaacaagcggcttcatgaactcataatcaacaaacagactccggaaggattccagggatatctgtctggggataaaggtggacagcgagaagggcgaagcatatttaaatatctcctcactgggcctgatagacgacataaaagagaaaaataccggcagcacaagaaatacggcataaaacagcatcagcccatactgcacggttccaaacagaacatgtttgacagtccgctttttcatatttttcctcctctttcttaatgctttggcttcagaactttcatctctaccatgaccactgcaaatgacaccagaagaatcaaagtcacaatggcataggaacgcccgaagtctgcatagataaatcctgatttatacgcctcatacatcatcaggtttgtggacatctcagggcctcccagggtgatcatgtacatgggaacaaacatcagcaggttggccaccgtgttagagacaaatacaaacatcatggaccgccgtatcagtggcagtataatatcccacactgtcctgaatccattggccccgtcgattctggctgattcaatcagggattcggatacctcctgaatgccggacaaaagataaagcatccagtaaccgcagcccttccagatacagataaggatgactgacatcatggactgtttcgggctggtaaaaaagggctgggccggcattccgaacatcatgagtatgctgttgaccacgccctgattgggattcagtaatatattccatatcatacaaccggaagaaagagctatggctatgggcatcatgaatacagaccggaacgcgctgttagccctgcccggtacgcgcaccgacaatgccagcagtagagaaatcagaatctgcaggggcgtggtaatgagattgaaaataagggtcaccttcagcgttttatagaaggtggggtctgtaaacagcgctgtgtaattatccaggcccgcaaaatacgtttccccccgcagaaaggattccgcaaaaaaacttccggcaaaggatatgatgatggggtaaatcttaaagatgaaaagcaggagcattgccggtgcaagaaacagatagggttcccaagctccgggccgttttttaagttttgctggctccatgggccgacctcctcctatttaaggagatcgtatccgttaggccggatacgttcttccaacgtcaacttatgccgttttagctactttgtgtactttttcaggatatcatcgatcctggccgcagatgtatccagagtggtctttacatctgctccgtttcttatatcctcaatggctgcatttacaacatccgaccactcgttgtatccgggagtctttggccttgatacagaataattctccaaatcgctggccagcagggcgtacacttcatggtccggggcagaggcatccgtaatccgggcaatccgttccatattagccccgatattattctggctgtccaggaatatgctgctcccctctcccacggtaatatacttgatgaattcagccgcctcttccttgtgttttgaattggcattgatgcctatgtgccaggagtcgcaccccactgcgggcacgccgccctcaaaataaggcaccggacacacgcctacattgattccctttcccttggctctggcgtagcataccgggtctccccatgtaaatgccacctttcctgtctcgaacatttccctggcctcattggtgttcactcccttaggggaaaccccgtatttattaaacaggtcctggtaaaaggtcatggcttttacactggcctctgagttcagatatccggtggctgtcaggccatcttcgctgagccaggcagctcccagggaattagccaaaggcattacattccatacgcggttaatctggtcaccgattatgccccagcatgtggtggtaccgttttccacctttgtaacctgccggcagatatccagacactcctcccaggtcatgcgcttatctgtctcataggcgggatacggaatattgttttcgtccagaatgtccttattatataccataatcatgcctgactcccttttgggcgctgtcataacttttccgtcataagcagctgcattgagtcctgtctgggtaaaaaccttatccagttcatccctgctcatgtagttctcaaaaggctccagatatccccttaccgaataggaggtcacaagaggcgcatccacattcagcacatcaaagtcgcttaacttagatttcatctttacttcaaccatctcgatcatctggtcaaagggatatgattctgtctttaccttgattccgggatgggattcctcaaacttctgtataatctccttacccacatccccctcccacacatctgcatgggaattcagatatacgatttccacaggttccccgccctgcgccttttcctggctgttctccggcatcttttccgtctgggcagcgctgctttctgtccgctggctctttgaagaacaccccgccgtcgaaaaaaccatagctgttactaatccaaccgctgctaactgtttaaacttcataatatgtccccctagtcattgctgatccttctgtttatcacacactgctgcaaaatacgtcattgttcttttttataaattatgcataatttattttgactttatatattaattatatatattttgtcattcacaacaaccaggccaaattatgattttgtgtaatattttactatctccctgtttactcccaatcccactgtacaattctaccctttattcctgtattccgtaggtgtcattcccacccttttcttaaacagattgctgaaatactgggaatcagaaaatcccaccatatacgccacatcatttaccctgtatcggatatccaaaagcagttccttggctctgtcaatccgatacgccgaaatataatccgtcagattcttattggtgtgtcgtttaaacagttcgcacagataattgggcgagatatacagttcatccgccatattctttagtgtgattttccggttatagtttgaggcaatatactcctgtgccttcgcgataagctgatttcccggctgcttgtccctggccggacctgttttcagggtccggcccagttttttctcaatctgcctgagcgtatctattaactccaaaggattggtaggttttgtcagatatctggtcactcccagctctatggcacgctgggcataggaaaagttagtgtatccgcttactatgattacatccacctcagcattaacctcccttatcttatatatcaaatccagacccgacatgcggggcatcttaatatcggtgataattacatccgcctgcccgcccttcagatattccatggcggctgcggcctcctcaaagctaccggccacggtccattcttccagcccttcgaccagcctgcacagtccgtttcttattttcggttcatcgtccacaacaatcgctctcatgtcattccctccctatgaattgccgggtatgcagaaacggatgaccgttccttcgcccaaccggctctctatcgtaagcccaaactcttccccatagtacagccggattctcttatttacattttccacgcctatgcttctgtggtccatccgcatttctgtggtaccatccctcagccgcttcaattgttcttcatccatgccagccccgttatcgctgacctccagccagcatcccccatcctcctcacgttcatatacccttatgctcacctttcctcctgtttcaattccatggataatggcgttttccaccagaggctgtaaaatcagcctgggaacctgaacagattcatactggtgcggaatatcaatctcatattccagtttatcctccatccgctccttctgaatcaggagatagtttgatacatggcggatttcctccctgagggccacggtcctggaggacctgctgattgcatatttcatcatctcacccagggacaccacgataccgcttatctcatattcctttttttccagcagcatccaattgatggtatccagggtattatacaaaaaatggggattaatctgtgactgcagggcttccagctccgcatttttctgggccagtttttcctgatagacctcctttataagcatgtcaattttgaaaaccatgtagttgaatgtctccatgagacggcccatttcatccgagcgcttattgtctatgcggtaatcaaaatttccctgctgcacttccctcatggcttcaatcagcttcttcaccggggccgtgatggccagcgacactaccagaaggcagaccagaatcagcaggttgcacagaatgatgctgagcaggatggagtggttcaggctctgcacctgggctgagatatcagaatacggcaccaaggtataaatcttccacccggttgcctcattttcaataactgacagcgccatacgctcctgtcccaccatcagttcctttgattccccgccccggttctccatggcgcataccgcgtctatgacctgggaaaccgtcttttcatcccctgcaatcagtctttggttctggtccagcataaaggtcatctgatggggaaatgaggcattctccgtatgcaggatgtccagaaatgtatccgggttcaaatccatgatcagtacggcaatcacctcctgattgtaaaaatccgtaatgggttccaccatggtaaggaccttttccggtccggtgattccctccatataaaaaagcaggttgtcctgaagtccaagccataccggctggcctccgtgctctgaagccgcctcgtagtacttggaagacaccaggtcaaaatcctgcagcctgtaataatcataggtgctgtacaggatattggaacggtcgataatcatgatattattcagcggttcaaacgaaagaacaagggaggaaaaatactcagctatattgcgcttgctgcgccccacctgaaggtagtcctcaccgctgtggatattattccgcacaatctggctggtggccgtactctgtcccagctgtgtcatgtaggaaaccttatccgtgacactgatattgattttctccagcatattctccatctcatttttcttgttattaaaaataaggctccttgcatggctgtaggcaaaatagcccatgataccgccctgaagaatcccgatggttatgaatacaatcatgatttttgcacggaatgataactgtttcacgccctgtcccccctgtgaccatattttttctatcatatcatggatattttgggattacaaatcccgaggggggatatgatgtaccggcttttggacaaaaaaacggtcctggcttaccgccagaaccgcgtcctgtttatttttaccattcaacatataaaagcggactgcactgcatccgcactgtttcgcagtctcctttgtccgtcctatggccttacagccgtcccgtcaggcagtcttgcaaacagccagctgtgatccatatccactgccggatatttggcggcttccttctcatcaaagccaacaccaatgcctggtgtgtcgtccacatatgcgtacccatccctgattttcgggcagcccgggaatacagcctcttcctcctgggtaaaaccggagaactcctgtattccaaagttatggctgttcaggtccagatgcatctgcgcgcacattccaatcggtgacagatcattgggaccgtgccatgcggtccgcacgccgtatgcatcgcagaaatgagccagctttacagcaggggttatacctcctatatcgcttaagtgcacccttatgaaatcaatccactggttttggataatggttttccactcagccggattggtaaacagctctcccatggcaaagggcacagctgtctgctccctcatatacttataataccctacctggtcaggagccagagaatcctccaggaaaaacagcttaaatggttccagttcctttgtaaaagcaagggtgtctgccagtgataaccgctcatgaacatcgtgcatgacctcaagctcccatccaaaatccttcctcacctgctcaaacaggcggattacactgtccatatacattttcggatggaaatacgcgccttccggtgccccctccggttttaccatctgctggcgcctgccgtcgaagttcccgccgtaggtccccatatgacagcggatgtgccggtatccttcctcaatatatcggctgatgcactcttttacctcttccaggcatcctccgtctgcatggcggtaaaccgtcacgccttccctggcctttccgccaagcaggctgtagagcggcataccggccagctttcccttgatgtcccacagggcctcatctactcctgatattgcattgttgaggattggaccattgcgccagtaagagcttcccatcatggtctgccagatatcctctatattatgtacgctccttccctttaacatagggcagagatattcctcgatggctgtaaccacagccttgtgcctccatgtaaaggtagcgcatccgtatccaaagagttcgggttccgatgtctctaccttgacaatgaccagattaattccccttggcgctgtcacaaatacttttatatcccgaattgttatgttatccatgttctaattctcctgttttttataatatatatccccgtattatgtaacctccgcccatacagtatcagctcttaactgccccgcctgtcatgcctgcaataaaatacttctggaagcatataaagagaaccaccagcggcaggctggacacagtggaagcagccatcaggtcattccatttaatctggtactgggaattcagggaaatgatgcccacggtcaatgtcttcaactggtcgttggaaatcaggactgaggagtacatatactcattccatccgctgaacaggacaaatatggcaactgctgcaatgcccggcacaatcaggggcagtatgatgttccaaaaaatccggaagctggatgccccgtccaccctggccgcctcgtccagctcaatgggtactgtcttaaagtaggaaaccagcatccatgtgctgaaggccacattggtggctgcatatacaatgataagcccaatcagcttgttggtcatatggtatttggaaagcaccgcatagaacggtaccaccagcatgacgctgggaaacatctgggttaccagaaggaaatccatcagctgttttttacccttaaactggaatctggtcaccccgtagccggccagacatgcacatgtaatacagataatcatggcaaagatacatgttaccaggctgttaagggtcattcttccgaaattgtaggtagtgaagaatttgcggaaggactccaggctgattgggtccggtatccactggggtttaggcgagtaggtctgggcctctgtcttgaaggcagtggaaatcatccagagaacaggcaccaacaccataagggccagcagaatcaggaccacataacagagcacttgttccattctgcgtttcgacttcattttattcatccttcagcaccaccttatacacagagtttatgagataacagataatgaaaaccaggattccccatgctgctcctttaccgaatctcaggtcattgaatgcggttccgtatatgctcaggctgatcaggtttgtggctgtgcccggcccgcccgctgtcatggtaaagacctgggtatactgcttgaaccaccacacgctgtccaggataatcaccgttgtcaggatgggctttagggaaggcagggtgatgtagcggaagctgtcccacttatttgccccgtcaatcaccgccgcctcatacaggtccttggagatgctctggagtccggccagtatcatggtcatgaccagaggaaatcccttccatatacaagtgaagaccacggacggaaacgccagttccttgctgcccagccaggatatgttggctgaaatgatacccagtgacttcagcatatcgtttagtacaccatacatgggattcatgatccaggtaaacaaaagggctatgacagcttccggaaaaagccatgggagcataaaaatgaccctgaatacagtccttcccctgaactccctgtttagcaaggttgccaggatgaaacccaggacaaaatgcccgattaccacaaatatcatgaactcaaacgtaagcagcaccgatttatagaaagacggatctgtaaacgcctctatatagtatttgaagcctacgaatttccacttagtcaccaggttagtattgaagaagctgatataaaagccataggccatgggatatataataagggctgccagcatgaatacaatggggaatgcaaataagtatccgtcattctggtatttgattttacccgcggttccttttgtttttaccttagacatgatatcatgaccctttctttgcctgtattaattgtaatcttccaggagctgatcaagatcctttaccagctgttccgctgcctggtcgtttgttttctcgttgctgaatacagctgcataggcatcacccagggcgctcttaagtccgctgattcccgcaaaagccagggtcggacggcagccgtcctcaatctgctttaagaaacctgcataatcatctcctgttatataggaaaccttctgtccttcggtggtggacggaatcttgccgctggactcccagaacttcatatccttatcgtgggaggtaaagaatgccaggtatttggcggcagctgccttctctgcgtcagttgatttggcggtaatagcatatccctcagctcccagcatagtgcctgaatactctccggggagtttaaaggaaccaagctttccttttaactcaggattgttggcataagcaacgcccagggcatttggtccggtaaggaacatgctggtatagcccatggcaaagtagtttgccgctgtgggataatccacctctgtgataccggtgggaaccacaccctccacattgttcatatctgtccacttagaaaatacatccacgaatgccgggtctgtggtaatatctgtcttccactcatccgatccatcctcctggtaagcaagctcatatccattgctccagagataggacataaaacggctctgccctgaggaattattggagcctaccatggagaatccccactggtccacctgtccgtccccgtccgtatcctttgtcagcgcctttgcacagtccacaaactcatcccatgtggcaggcactttaagcccagcttcctcaaaacgatccatccggtagataacggcctgcggctgcacggccaccggataataggtcatctgcccgtcaatggtgcaggcatccataacgccgtttgccaggccgtcaatagcttccttgtccatccagttgttaaggtcctctgtcaaacccaggtcataaagggtgggcacctggtcagcagatgtgaagaacatggtgggaaggtcatccggggaggttgccatggctgccagctttgtataaatatcaccggaggcaatggcctggatttccaccttaatgtccggattttccttcataaattcctctgcgtactgatatatgtactggccatgaggatcctcaggcgcatatccgtccatgacagtcaaagtaacctgttctccggacgcggcctgtgtatccttatttcccgtcccggtaccgccattatcctttgtgtcccctgcctttacttcctctgcctttgtatctgccgtgccggatgatgagcctgcgcatcctgtcacaagggatgccgccatcactacggaaagcattgctgataagaatcttcttttcatgtcagttcctccatttcattgttataaatctctcttaattaccggccggtaatcgtttgttctgatgggaatatcatacaacaactgatatgaggaatgtgattattatttagtcaaaaatcaccatttttttgtcctgtgacaaaaatctgcataaaaatagcagctggtatacaaaaatcaccagctactttcttctgcatcgtctgcttgtttcccaccattcatgtgcagatttacggtattgaaggggagaaacgtccataattgatttaaattgccttaaaaatgtgtttacgctgtcataaccgcatctctccgctatcactgccacgctatcactactattttccaataaactggcagcctcgcagaccctcaccgtattgatgtacttgtttaagttgtatccgcaatacttggtgaaatccttgctgatggttgttgggtgaagaaaaaatttttcacccagcatattcaggttcagctcctcattaaaatgaacatcaatgtattccttaatctccagcatcctggcattggaaggcgagatacccgactcactccgctcaaaccggaagactcgaaacagcagcactgctatctgggtgataatggtccgctgaatctgggtacggaagggcttatgcacctcgccctcctcctttaaatagcacagcatatcgatcagatgtccaaacaccgcccggtccacatttttataattttggacaaacacatccggcgggggcgtaccaaataccttctgcaggtcatggtccaagataatacttctatagtaggttggtttggctgtgaagccgtatcttgaaaacggcagcctgtcaatccgcctcagatggtgttccatggcacctatgaccagaatatcatagggctccacatggtacttcctgcctgagatatagtagtccgcagccccgtcctccaccaggagaatctcactggtattatggatgtggtgcatctcgttcttctcatattcacaggtccgtgaaatattataattatcctcactgattgcccggaaatggtccggctcatagtaatcattaatcttaatctccatgtggtaactataacatacctgcttctatatgtcaaaaacgcagctccccgcacctattggcatgccactgataaacctcagcattcccctgctatttatactcttatattgttatgaccaaatactcccctgtcatctgcagcaccgcatatcttgttatccctctattgcgctgcgtttttcttaagcatccccagaatcacgcatccggccgctgctcccgcaaccaccgcagccagatacataaggggatttccaatggtgggaaggacgaagatacctccatgaggcgccctgagggtacagccaaatgccatggaaagccctcctgcaatcgcagaaccgatgatacaggaaggaatcacgcgcagcggatcctgggccgcaaagggaatggctccctctgtgataaaggacaggcccattatataattgacaataccggactggcgctccttttccgtaaacttgctcttaaagaaagtggtgcacagggcaatggcaataggaggcaccataccgcctgccatgacagcggccatgacctcaaagttgccctctgccagctgtgcggttccgaacacatacgctgccttgttaaacggaccgcccatatcaatggacatcatgccgcctaataccatccccagcacaatccggctggtgccgcccattccgttcaggaagtgggtaaggccatcgttaatcatacccatatatgggttgatgaatgtggttaccactgctgccaggaagataccgataaccggatagagaagcaccggcttgatgccttccagcgactttggcagctttgagaaaagcttccttaagcccaccacaatatatccgcctacaaaacctgcaaacagagcgcccagaaatcctgcgttcacatcgccgcctgccgggttggcaaaggtggatcccatcttggcaatcagtcctgccaccaggcccactgccaggccgggacggtccgcgatactcatggcgatgaagccggccaggataggaagcatcattccgaatgcctgctcgcccacggtcttaagataggctgccagaggcgtattcttaccgaagttggccggattgatggaataatcgtcaaacaggaatgccagggcgatcaggatacctccgccgataacaaagggaagcatgtgggatacgccgttcatcaggtgcttgtatatagtcctcccaatgctgtcattgccttccgacacggactctcctcccgcggctcctgtgtgatggtataccggcaccgtgccgtccacagcccgtttgatcagttcctcggccttgtggatgccgtcggccacagggaccatgataacaggctttccgtcaaatctggccatctccacgttcttatccgctgcaatgataatggcatccgccgctgcaatttcttcccttgtgagcacattctgggctccgccggaaccgtcggtctcagctttcagggcaattcccagcttctttcccgtattctccaggttctcagccgccatgtaggtgtgggcaatgccggtgggacaggccgtaaccgccagaacacggtaaccggaggaggcgcctgcttctgcatccgcctttgcatccttggccgcctctccctcaggcgctccaaaacgctctgtctctgcctcatctatgatgcgtaaaaattcatccttatccgctgcccccataagcccttccttgaatccgggattcataagcagggttgacaggcgggataatgcctccaggtgtacgtctgctccctcagcaggcgccgcaatcataaacagaaggttggccagggaaccgtcaaacgcgtcgtaatcaacgccctctggaaccaccatggccgccagtccgggcgcctttaccgcctctacctttgcgtgcggaatggcaattccctcaccgatggccgtgctgcccagggcttctcttgccagtatgccctccttatatccggcggtgtccttaagccttcctccggcatccatcagggataccagcctgtccacggcctcctccttatctgaaacctttacgcccagttcaatactctctttttttaataactctgtaatccgcataaatgcgcccctcctaaccggttaaagtgtgtttaagagtctcataatttcatcttttgttccaattccgtcggaaaatgccgtcgcgccgccgcaggctgttcccagcttcaaagcgtatgcataattccctttttccaggtatccggctatgaatcctgccaccatggaatcccctgccccaacagaattctttaccgttcccctggcagcctgccggcggtgtacactgccgtcctctgctaccagtatggctccgtttcctgccatggataccagcacattcaccgctccctgttccttaagcttcctggcatggagaatgatttcctcctctgtctcaagctccagcccaaacatctgtcccagctcatgattattgggtttaatgaggaacggacggtattttaaaaccttcaggagcaaatccttctccgcatccactaccatgcggattcccctgccgtccaggcgttccatgattctctggtagatgtcactgtcaatggcagccggtatgcttccggaaaggaccagcacatcctccttttttaaataggaaagcttctcaaaaagctggtccacatcgccggctgtaatctccggtcccatgccgttgatctcgctttcctggtcggacttaagctttacattaatacgggacatgcccttctccacctggataaaatctgaatcaaatcccaggctcctgactccccgctctatctcccggcccgtaaaaccggcaatgaatcccagagccgtactcctgtatcccaggtttgccaaaagcgctgaaacattgatgcccttgcctccgtaaaagatgttttccctgatggtccggtttacacttcccaatgcaaaatgttctactttaaccacatagtccagtgccggattaaatgttaccgtgtaaatcatatatctccgcacctcctttttatgaaattttatttcttatgttgtctctatcataatacgatgctatattttcgtcaatagtattttataagaaaatttgtttcatacatttttttgtcgcaatatacaaacagacggcctgtttccgtaaaaagccgtctgttttttgtgcattattttctattttatcgttagtactgcgccgcgtaaataacagcgaaacacggttccattatttcttatccggcgatatggctttttcatgacgccgtatatgctccatggaccccttcataccagcccggagcagaaggtaaagtatttccatcactgccgtagccgtcaccctggaaaaccagaactcctctgtcagcagcttttccctggtggcagtgacaatcttgtaatcacatatcctggccaagggcgaatttccattattggtaatgagaatgaccgtgcatccgttttcctttgccccctctgccagggtctgaagacgcttggagcttcctgaattggatatgaccataaccacatcctcctggcccaggttaaaggtataggcagtctgggtttcccatatatcccctgccacagccggtattcccagctggttgaatttgaaggcgccgtccagagccacgggaatggtattgcccacggctgccagctgcaccattcgggcatgctccagcctgtccagaatatgttccagattgtccgggtccatcatgttcacggtctccgtcagctcagccaccttgttagccagtatattctgaagagactgccgcagatcgccgcggtcaatgtcattggacacattccggtccatttgttcttcttccagcacctccctggccaatgccagcttcaggctgtggaatcctttgaagccgcaccgcctgcaaaaccgggatacagtggcgtcgctggtcccgctggccctggccagctcgcccaccgtcatatccaccacttccgccttatgctccatcatgtaatccgctatctttttctctgcttcaaaaaattcgtcataggaggagcagatgactcccaacgcgcttcgtgtctctcccatatcatattccgcctgtctcatgtaaatttatttcatggtctaaatatagcacacaaaacttaaaaataaaagttgtttttcgtcatatattataatgctttatgaaactttattaacttttcgttactccccttgtttttccttttttactgtgctataatctctaaacgttaacatattattaacaatttgtttatatttagccgcatattatcaggtcttcaaatgtgagaaagaggctggtatcatgaaaaatattataacatttctttccaagtacaaacatgcatggctgctgtgttacggcttcatttatcttccatggttctgttacctggaaaagacagtcacccgtcattaccatgtaatgcatgttgccctggacgacttcatacccttcaacgaatattttattattccctacatgatgtggtttttatacgtggcaggaaccatagttttcttccttttccgtaataaggaagactattacagaatttgtaccttcctgttctcaggtatgaccatcagcctgattatctgtacctttttccacaacggaacagatttcagaccggccattgacccgggtaagaatatattttccggcatggtcgccgccctgtaccagacggatacgcctaccaatgtattccccagcatccatgtgtacaactccatcggcacccacatcgccatcatgaagagcgagtcctttaagaaatatccctgggtgcgggccggttcagccatccttatggtttccatctgcctgtctaccgtattcttgaaacagcactcggttatcgacatggtgggagcagctatcatggcttatgtgatttacgggatcgtctacggatacaactggtctgccgaagacaagaaggtcacccagaaggcgctcagttaaaaggccggaatttagatgtttggaaattaaatgtttggaaatcaaatgttcgcaaaatcaaatgttcgcaaaatcaaaaccgctgtatgtcagtcattctgcaaactggcatacagcggttcttttatccctatgctttttatttctatacttctgttacatatctcccctaccgctcctctttatcctttggcagcagcaggttcaggagaatggaaacaactgccgctatgaccacaggcgtttttgcaaacaccacggtcatccaggagggaaaaccgcagagcgcgtcggatgcctgggtaacccctgctccaagagccaccgctataccaacgataaagccgcttctcaccgacaggccggtattgaatatcatgcggattccggtcaccgtgatggcggcaaacacagtcagggtagctccgcccagcacacactggggaacactggtgagaaaggcggaaaactttggcagtattcccgcaatccccaatataatggctgccagagcagcgacccagcggttcaccaccttggtggtggtgacaatccccacattctggctgaaggtcacattgggaagtcccccaaaaaaggctcctatgatattgctcagcccgaatcccagaataccgccccgcagctccttatccgtggcttccctgtccattccgcccatggtggtggctgtcacatcccccatggcctgcagggaattgatggcaaacagcagaccgattgccacacaggatgaaacttcaaattcaattccaaaatgcattatctttggaagggcaaatatgcctgcacgtcccacagcgctgaaatcaaccattccaaacccaagggcaacgccgtatccaacgataattccgataagtacagaagccagctttatgattcccctgccataattattacagactatgaccacagtcagggtaagtgctgccaccagccagttctgccaggaaccataggactcactgccctgtcctcctgccatatagcgaatggcaatggggtatagggacaagccgatgcacaggatgacaatacctataatcagcggcggaaacagtgacttgatcttgttgtaggacagacctaccagtactgccacgattccgcctacaatctctgccccgaagatggtggctataccgtagccctccacaatggtggacatgcttgtgacataggcaaatccaaccccgacaatcaacggcagtcccgctccaaactgaaggctgcctttcctgaatccgactgggaatacctgcaaaagggtggccaaagcagataccacaagagccgcctggacaatgatgaccttatcttccccgcttaaaccggccacacccgcaatgatgatggcaggggtcacacatcccactatcatcgccacaatgtgttggaaagccaggggaagcgcctgtcccaaaggcggcatcccgccgttcagttcaaaaactgattcttttttgtgtttgccttctttcattttacctccttttcatataaaaaggtcctatgaaagcaaacagaaagacagcctgattatagctatttttccattatacgttccatagaaccacttttttgtttgtatatatgaataattttttgacgttttatttatatcttattgtaaaataataccacaatgttaaatggttgtcaatctttgttggtgaaaatatcaaagaaaaactccgaaaaacaatcttctcaaccacataaacgcagcaaaaaatccgcagtcctcctggccaacaggatttctgcggatttttcacttgatttttcacctgagtatcggattgacaaatttcgcttggacttactgcccctttgaaaaaggattcagcattttgcttaccacttccgcctcagacgggccttcaaacagggtgcttccctggtccttggctggtatgccgtccaccctggagccgtcaattccgcccctcatctctacttcatgcttatagtcagccaggtatttttcgatggcgctgattttgtcctcgggcgcctccataccttccttagatagtcccatgatgtccatgaccgtatccagctcactggcatcccagtccttaagaactgtgtttgcgagaaactgaatccgctccctgattgaattgcacttcagaaattcttttaccatttttaagacctccaaacatatggaaatttcttgataccggctatactatactacttcgttaaaaagatgtcaattaaaaccgtaaaatttctgcgttattttatatcccagaatcaaaagttcccttccacccttgccgggaaggttgcagccctgtcccagaaagcccattctgagccgcaggtaaaggggcagattctgctttttcaggtactgccacagctctttctttttctccaggttttcctctgttccggatttgatagccaggacagaacaaatggtcatcatgatttccaggtattgtatcatgtagtggcgcagcttcctgctgcttatcttcatggcatcataataacctaacatcagcttggtgacccgaatctgctggtcaatgcggccaatcatcacctcttcgttgacggactggtcctgccttccgatgtaatagcggtagaaattcacatccaggtaatagatatgcttcacatgaggcaggggctggtacacaaaaatattatccacataaaaggtatgtttgggaagctccagcccgcactggatcagcagccctgtcctgtaaataacagagtgcatcagtatatactgccctgtcatgaaaaacttcacgtcattccatccaaataccttgtcctttggaaatgccgtgtggtatttcatcacttttttccttctggccccttccttctcatagacaaagttggtaaccagcatgtccagggtctctcccccgtatacaaagcgcctcagggtatcaagaacctgtacatatgcctcctcattgacccagtcgtcgctgtccaccaccttaaagaaaatgcctgtggcatttttaagtcctgtgttcaccgcttccccatgcccgccgttttcctggtggatggcacggcagatagtgggatattcccgggcataccggtcagcaatttctcctgtcctgtctttggcggatccgtcatccacaatgatgatttccacttcctccccgcccgtaagcagggtgttgatacagtgctccatatagctttccgagttataacaggggattgccacagtcaataacttcacctttctacctcctcattatgagtacttagccaaacgctgccagggctgccagattggcggccccgtgcatcaatactgccatgggatacttgcggtattcgctgccttcatagccccatgccagcaccattcccaaaaggaatgcgtatgtgccttgaatccagtttccatgatatatcccaaaggccagggaggatatgaccgccgccggaagaaaggccatgaaacgcctcagccatccgtacagaaccaggcggaaggctccttcctccagaatgggagccaggaccaatgtcatccacagcagttccgctctccggtatatggccggaatcatggcctcctcataagatgataagagactgccgggccacggtataacattcaccagcagattgccggccagtgccgccgctgccgccgccagtacacgcttctgccaccctgggggcagaacctgttttccatccctcatacgcttcctgtccttctattcttattctgctgacagtatagcatggctccccgggttttgccaccatctttttactcttttcattgcattttttcccatattaccctataataaacttaatttatatgacaattttaaagacaagcgaggtacggattatggcgaaaaaacgcatcgtaatggccatcggccacaaagatatgggaaccaatcttcctgaacaaaaggcagctgtggcgagaaccgccaaaatcatcgctgatttcatccaggagggatggcaggtagccattgtacacagcaacgctccccaggtaggcatgattcacacagccatgaatgaattcggcaaacagcatgacggttatagccaggctcccatgtctgtctgctccgccatgagccagggttatatcggatacgatcttcagaacggaatcagagctgaactcattaagagaggcatttacaaacctgtaagcactgtattgacccaggtgacagtggacccatacgatgaggccttctatacccctgtcaaagtcatcgggcgtgtgatgtccaaggaggaagcggacgccgaggaagcaaagggcaaccatgtgacagaagtggaaggcggttaccgcagaatcgttgcctccccccatcctgttgccattgtggagatcgatgccgtcaaggctcttatggacgcagaccagattgtcattgcctgcggaggcggcggcattcccgtcatggaacagggctataacttaaggggcgccagcgccatcattgagaaggaccttgccaccggactgctggccaaggagatcgatgctgatgtgatgatgatactcaccagcgtggataatgttaccttaaactacggcacgccccaggaacagcccatcagccacatgaccatagaccaggccagggattatatcagccagggccagtttgaattcgcctccatgctgccaaaggtatctgcctccattgatttcctggagagcggaaaaggcaggaaggccatcatcaccaccctggataaggcaaaggacagcctgaaaggccatgcaggcacggtaattgaataaaaactttgatttaagcgctttgatttccataggaaaacagtaaaaaatccactaaccccaagtattttccaagggttaatggattttttatatgccttttatgcttctgccagcacccgctccgttatatagctgaccatctcatcctttttcattcccagagacagggccagttcggaatacagattatcctccgctgtcttaaaataccgctcgtccaaatccgtcatcttctttccctgctccaagcggtcctttctgcgcaggtacaatgcttttatcatgctgatccacacccggcagtcacaggtcttaagggcttccttataccgttcctcccgctgtttatcattggtcacctccatctccttcacatccgagattttgtcaatcagttcaagggcctcttctttggaaagaagcggcctggttatggttttctccgaatccacaggcgtcacaattttactgtcttgctgataatagggacggagtacataatacagccggtcctttggaccatcaggtctgtcgattgtgataatatccatcacctcgcagacgcccctgatgccgtatatgatatactgacctttctgatacataattttaccgcctacttcccttattttataatacttatattgtatcactaaaagggtgtcgatgtcagaagttttttggcgctgcctcaaattttgtaaaatatataccatggtgccgcctggttatttgtatacaataaccagttcattgttctttgcaggctcctgtccggtgtcagtcctcctttgcttccaccacagccagtatttcggtggcgctgccccccggaagctcattggctccaatggcaagtcttgccgcgattcccgcttctccatataaatcccggaacagccggctggccccgtctatgacctgcggctgatttccaaatcccttggcgcagcgcacatagctgataatctgtacaaactgttttactttatccaaatcgcccaattccgccttcagaacagacagaatattaagagcgcatatttgggcggacctctggccatcctctatggtcaaatcctcccccacaacgcccaccacctggcgcactccatggatgtccggcgtctgaccggcaatataaatcagattccccactcttcttgacggtgcatacaatccgttgggctttggcagctcaggaagttcaagtcccatttcccgcaatttctgttctactttcataaccttctccttatcatttttatattttctgcattctttatgcaaaggcgccgcatacagcagacgaaccaccatacccagcgccttcggcacaagccatttcgttaaacacgttcttctctatgatttccttttcattgccttacgcattctttaccgtagcaatgtcaatcagggtcagctccttggcccggttttccaggctggttaccagcgcattggccgtatccagggaggtcaggacattgacgcctgtttcgatggcattgcggcggatgatgaaaccgtcatggctgcgctctgcgccctgggccggaatgtcgataatcaggtcaatctgatgtcccagcaccaggtccaggatgttgggagattcctgctccagcttgcggatttcgtaagcctttacaccgttcttattcagtgtccgtgcagtacccctggtggcaaatatctgatatcccacagcagcaaacctgcgggcaatatccacggcctcctcctggtcgctgtggcgcacggacataatcattttcttgtattttggaagacggattcccgctccctcaaatgctttatagagcgcttcattgaacgtctttgcaatgcccagacactcgccggtggacttcatctcaggcccaaggctgatgtcagcgccccgaatcttctcaaaggagaacacaggcatcttgatggctatataatcagctgcgggctgcaatcccggtttatagcccagctcccggatggtatggccgcagataatccgggttgccagcggcacgatggggatgccggtaaccttgctgatatagggaaccgtccgcgaggaacggggattcacctcgatgatgtatacgtcgtcaccgtccacaatgaactgaatattaatcatgccctttacgtggagggctcttgccagtttctcagtgtagtccacaatggtgtcgatattgtgctgggtgatgtcctgggccggatacacggagatactgtcgccggagtggataccggtacgctctatatgctgcatgataccgggaatcaggatgtcggtgccgtcacagatggcatccacctctatttccttgcccatgatatacttgtcaaccagaatcggatgctcctgggctatctggttgataatgccgatgaattcgtcgatatcctcatcgcttatggcaatctgcataccctgtccgcccagcacgtaggatggcctcaccagcaccggatatccaagcttatgggctgcttcctttgcctcctcggccgtaaatacggtatgtcctgcgggccttgggatattgcactgctccaggatggcgtcaaagcgctccctgtcctctgccgcgtccacatcctctgcagccgtacccagaatgggaactcccatcttcatcagggcttccgtcagcttgatggctgtctgtccgccgaactgcaccactgcgccgtccggcttctcaatatccacgatgctctccacatcctccggggtaaggggttcaaaatacagcttatccgcaatatcaaagtccgtgctgacggtctccggattattgttgacaataatggtctcgtagccttccctgctgaatgcccaggtactgtggacagaacagaagtcaaattcaattccctgtccaatacggattgggccggaacccagaacaagcaccttcctgcgcccggtggtctgctcagcctcgttaaaacctccgaagcaggaataatagtaaggtgtctcggccgcaaactcagcggcgcaggtgtccaccatcttataaaccgcgcggataccgttgtcatagcgcagcttttttatatcctcctgggaggttcccgtaagccttgcaattacattgtcgggatactcgattctcttggcctctgccagaagctctgccgtcagactcttttctcctgcgcccactgccttcagggcgtcctccatctccaccagaatggccagcttgtcaataaaccagaaatcaattttagtgatgtcgtgtatctgctcataggtgaatccgcggcgcagcgcctctgcaattctccagatgcgcatgtcatccaccctgtttaattcttcttccagtgtttcgtcggaaaggtccgtaaaatcataggacagcaggcagtccacatgctgttccagagaacggatggccttcatgagagcgccttcaaaattggtgcagatactcatgacctctcctgtggccttcatctgggtgcccagggtgcgctttgcgctgatgaatttgtcaaagggcagccttggcatctttaccacgcagtagtccagcatgggctcaaagctggcatatgttttctttgtaaccgcatttctgatttcgtccagggtatatcccagggcgatcttggcagccaccttggcgatggggtatcccgttgccttgcttgccagggccgatgaacggcttacacggggatttacctcgataacacagtactcaaagctgtccggattcagggcgtactgcacgttgcagccgccggtgattcccagctcgctgatgatgttgagggcagaggtacggagcatctgatactccttgtcccccagggtctgggagggagccaccacaatgctgtctcctgtatggacgcctacagggtcaatgttctccatattacaaaccgtgattacattgcctgcgccgtcgcgcatcacctcgtactcgatttccttccatccggcgatgcagcgctccaccagcacctgtcccacacgggaaaggcgcagtccgttttccagtatttcagcgcactgttcaggattggcggcaataccgccgccggaaccgcccagagtgtatgcgggacgaagcactacaggatagccgattttttcggcaatctccagaccatgctttacatcctccacaatatcagagggagccacaggctcaccgattttctccatggtctccttgaacatctcgcggtcctcggccttcttgatggtcagggccgtggtgccgatcaagcgcacattgtgttctttaaagaaacctgcatcctccagctccatggccaggttaagacctgcctgtccgcccagggtgggcagcacgctgtccggcttctcttttaatataagctgctccaccacttccacggtaagaggctcgatatagacacggtccgcgatgtccttgtctgtcatgatggttgccgggttggagttgagaagcacaacctcaattccctcttccttcagggaacggcaggcctgggtgcctgcgtaatcgaattctgccgcctgtccgatgataatggggccggatccaagcaccagtacttttttgatatcaggattctttggcatcagtcattcacctccatcattttaaggaaacggtcaaagaggtaaccggaatccaggggtccggggcatgcttccggatggtactgcaccgtgaagatattcttgcccacatactttaaaccctcgttggtgctgtcatttacattgacaaatgcggggactgccactgtcgggtccagattgtccgtatccaccacatagccatggttctgggaagaaatatatactcttcctgtctccaaatcctttacaggatggtttccgcctctgtgtccgtattttaatttatgggtatccatgccgttggccagggccatgagctggtgtcccagacagatggcaaagataggcacatctgattcataaagctttttcacttcccgtatgatggctgtattttcctttggatccccggggccgttgctgagcatgatgccgtcaggatttcctgccagcactttttctgcgggtgtgtcagccggataaaccgttacctcacatcccctctggttcagggaacgggcaatgtttctcttggcgccgtagtccagaagggcaacctttttaccgtttccgggaaggacgtatgtttctttagtggtggtcttaagcaccacgcctgtgacggtatactccttcatgcgcttaatgggctcgctaaaatcggtatattcctttgtagtaatcataccgttcatggtgcctttttctcttaatattttggtaagggctcttgtatcgataccgcagataccgggaatgtcgtgttcttttaagaagttttgaatggtatcctcgcttctgaaattgctggggattcttgataattctcttacaatatagccatccggccagggctttgctgactccatgtccttatggcagattccataattgccaataaggggatatgtcatgacaacggcctgtcctgcataggacggatcggtcagcacttccagataaccggtcattgacgtgttaaacacgatttcactgatgacttcacgttcagaaccaatgctggtcccggtgaacacagttccatcttccagtatgaggtatgctttcatatgggggtacctgtcctttcttatgtgtttgcttaagggccatgtgacctcagcccaaattgtaaagattatactgtatttcatatgaatttgcaatgactttaggagctaaatttttttgtgataatcaaatatttttttagtacaaagagggcagtatacagaccggacgaaacaagggcaggaccaaaaatatgcgccctgcccttgtctctgatgtctgctttttatagggaatgtctgcctcccatccttcctccgcggcgccggtcctctgtcccgtgttctctgtctgctcccggaaaacctctcctgccaaaccggctgccacccccctgtccgcaagctcctccttcctccatccggggccagtgctccatcatcttctccaacagggaggacagctgctttttctcatcttctgtcagcccgtcaaacatggctctggctttcttcatatgttcttccctgaaattccgggctgcctccattcctgaatctgtcagttccagattcatctggcgcctgtccctttcattctgcctgcgcatgatataaccacacgtttctaccttattgagaatctcgctgagggaacctgactgcactcccagcatgtcctgaagctcccgctgtgtgatgattcccctttccgccagcatggccagtattctctgctggcctgtctttccgcccattccgtagcggaagaagtgggtacaggaacggaactggtacaaaaggatatcctccagggacatgtcttcccggttaagatgtccgggacatcttccatgaaacccatggccttgtccatgatgatgctcccgaaagtgttcaccctcgctgcggttttcctgaaagtaccgtgttccttttccgcattccagggcgtctgcctgacaatggttgggacagcatgggcagtagtcctgggtggtatcattattagaattactggtgttgccggcattactggtattgctggcattgctgctattgctggcactgctgctgccatcgccggcatgattggtattttccatcttgtccatttcatttctattctcgtccatatcgttctctccttatctcgctgatgccgccaatccatatcacaaccatctgattttttacttcatctgtcatcttagatattatctcaaatgccatccggttcctatatggtctgacggactaattaattagttaggtaccttgtgttttatatcttactcctgttttttctttttgtcaaggtaccttgctaattaattttaatttttcctgtccggtcatatacacccccaccccgcccgccaaaaaaaagcccgccgcaattaaaaacaagcccccggcagcaccgggggccatcatacctttcacttctttttcatcatgttgcaaaatcagattattacactaattccgcaatccgggtaattcccacataaatatgcgatattttataccatgtggcaaaatccaccactcctgtctggggcagtccgaagatagactggaattcccgcactgcgttcgctgttccggaaccgtatatcccgtcgggcgtcaccctgggaatggccgaataaaccgttgctatctcatccagctgttcctgcatctggcgcaccttatccccggagcttcctatggtcaggtcgctgccaggccaggaggccggtatcccggatatctgctccgctgtgtttacatagatgctgtccccgtaaaaatgacgcagaatctcaatgggactgtagccctgctctccaagggagcatgacccccactgtgtcatccagttcggacactggacctggcgcccgtcacagtactgggtcaggataggctgtctcacacccggacgggacaggtagttatcaaatatctcatccacgatcaggctgatgctctcgaatatattccttccatatatccacttgtggtcaaaggcagtggaggacgtgatggtgaaatcatagccctggttcctgtaccactctgtgtatacccggttcagggtaaaggacatgattgccagcacattggctgttatggtggccctgggccaggtggaatatatttcgctggatgccacattttttatgtagtccctgtagggcacataatagtccttggccgtactgtccgttggcaccccgtcatggaccaccacggtctgaggcactaccacccggctgagtacgatttccccgctctcgttcactggttttatctctggttccgctatctttggggggtaattcccgtacagggtatgatccggtatcaccaccgggtcttcgggaggtgtttccccgccaaccggtgtcatgactgccggctgtatggccgtggcctgggccagtatctcggtgcctgatatggccagaggctcaaagccctctgcctccaccatcaggttatattctgaatagggctggataatgcttggttccagactgtattccacagggggcgccggaagctgcacctgctctgtctggcctgaactgttggtggtcagctgctccaccgtgcggtccggttctcctttatagctgatagtgaccctggcgttctgtatgggaaaattattctgtatgttgattacgttaatctgcagcagtccactggatgtccgttctggattggttgccatgtaatacctcgcagtttcttttcattacctaaatataatactgcccagcctattatatgcatgtattttcccctaaacctgaaaagtgcagcttaggggcaggcaccggcacgctacagctcatattccttaatccgcaaataggcacgtatggcttccatggccccctctgttcccagggatgccgtgttcagcatcaggtcgtagttctccacattttcccagtcgcggcctgtgtagtaccggtggtaatccctccgctccctgtcaatgcgcttgatgttcttcctgatatccctgggctcataatagcccagatcgctgattcgcttttcccggtattccatatccgcgtacaggaatactcttaccagaccttccgcaccctccagcacatagtcggcacagcgccccatgataacacagctctcctccgccgccagctttcgtataacctcggactggaaccggaacagattgtccgccgacaccaggtcggagccaaaggaaggacttcccttttccggggtcaggctcttgacaatcttatacaaaagcttgtttcccgccttctcgtctgccagatagtaatagctctccttgataccgctttggtctgaattcatgcgcaggatattcttgtcatagaaatggattcccagttccttggccagcctggcgccgatttcactgccgccgctgccgtactgtctgccaatggtcacaatgagtttctttccttccttcatacgcccatcctcctgttctgacagcgcaggcccacgcctgcttccatggtttgctttcatggtttcattatagcacaatgcgccctgagatttaaccgttattccaaaaatccttcttgacataccgccgcacagtgcttataataacactcaattgaataatatcttcagggcagggtgcaattccctaccggtggtacagcccacgagccgcaaggcatgattcggtgaaactccgaagccgacagtacagtctggatgaaagaagatggaacgatgacatggacgcgcttatgcgctttttgtggctggttgaaagtgccctggaatgaactatcattccagggcttttgtgtacctcccacccccatgccctccgtatggcacagaaactgtgccttgggttttatattttctgccttgaacgataccggttcaaggcattttttatagctgtttttacagctgtgaaccaggggacaggccatggctgcgccatgcgtgtcccatcatttgtaaaggaggcaccgcattgaacgattctgattacatgtccatcgcactgaaactggccagaaagggctgcaaaaaggtcagccccaatcccatggcgggtgctgtcattgtcagggagggccgtatcatcggacagggcagccacctttatttcggcgggccccatgcagagcggaatgcccttgcatccctgaccgaatctcccaggggcgcaaccctgtatgtaaccctggagccctgctgccatcacggcaagaccccgccctgcacggatgccatcatagaaagcggcatccgccgggtggtcataggcacaagggatcccaatcccatggtatccggcaagggcaccaaaatcttaataaccaacggcattgaagtgacagaaggtattctggaagaagaatgcagggaactcaaccacgtattcttccactacataaagaccggccggccccttgttatcatgaaatatgccatgacactggatggcaagacagccacctttgccgggcattcccgatggattaccggggagagagcgcgccgaagggtccatgaggacagaagcaggtattctgctgtcatgtgcggtgtggaaaccatactggccgatgattccctgcttacatgccgtctcccggataccaggaatccggtgcggattatctgcgattcacagcttcgcacaccgccggattcccaggtcgctgccacctgctcccaggccaggaccatactggccacctgctgtcctgacagggaagcatggcttccctatgaagaaaagggctgtgaaatcctcctccttccgccccgtgagggacgcgtggatctgaatgccctcacagaacgcctgggacagatgggcattgacagcgtcctgctggaaggcggttccaccctcaactggtccgccctgaaccagggaatcgtaaacagagtgcaggcctatatttcccccggactctttggaggcgcaaccgccaaaacacctgtgggaggcagaggggtggaattcccataccagggcttttccctgggaaagaccaaaatcacggtcctggaccaggacattcttatcgaaggggagttgatgccatgttcacaggaatcatagaggaaaccggaatcctgatgtctgttcagggcggtttatccggttcccgcctggccgtcaaagcagacagagtcctggaggacattcaaaaaggagacagcattgccgtcaacggcgtctgccttaccgcatattcctttgattccggctgtttttatgcggatgtaatgcctgaaaccctgaagcgttccaatctcgcccgtcttcccgcgggaagtccccttaacctggaacgggccatgacggcaggcggcaggttcggcggacatattgtgtcaggccatattgacggcaccgggaccattgtgagtattgtccgggacggcaacgccctgtggtacaccgtccgctctgacccgtccatcctgcgccgcatcatcgaaaagggttccattgccatagacggagtcagcctgacggttgcccgggtaagggatcaggatttttgcgtatccctgattccccatacagccttctgtaccactctgggaaccctgaaaccaggctgcgtggtcaatctggaaaacgactgtgtggggaaatatattgaaaaattcataaaaatccccccgccattccactgcacagaaggggcggacagcaaaagcacggggaccggcagccgaatcacgccggaactgctcaaacaatatggattttgagcggcgccagtaccggacagcaaataaacgaatcattaaaaacaggacacctgaattgtccccattaaaaacaaggaggatttatcgcaccatggaaggattcaacaccataaaaggattcagcaccatagaagaagtactggacgaactgcgccagggaaaaatcgtactggtgacagacgatgaaaacagggaaaatgagggcgattttatctgcgccgcccaacatgcaaccacggaaaacgtgaatttcatggcagtgcacggcaaaggccttatctgcatgcccatgagcccggaactgtgtacaaggcttaagcttccccagatggtatcccacaattccgacaaccacgagacagcctttactgtttccatcgaccacataagtacctccaccggcatttccgcggccgaacggggcgtaacggccagacagtgtgtaaatgcccggtcccggcctgaggatttccggcgtcccggccacatgtttccgctggcagccagaaaaaacggagtgctggaacgggccggacataccgaagccaccgttgacctgatgcgcctggccggtctcagtgaatgcgggctctgctgtgaaatcatgaaggaggatggaaccatgatgcggatgccccagctccttaagctggccggacaatggaatatgaaaatcaccaccatcaaggccctccagaactaccgcaaacagcacgataagcttgtggaatgcgctgccgtcacccatatgccaacccgttacggcacctttaaagcttacggctacaggaatctgctgaacggggaacatcatgtagctttggtaaaaggagagatcggggacggccgggacttgttatgccgggtccactcggaatgcctgaccggcgacgcctttggctccctgcgctgcgactgcggacagcagtttgccgctgccatggcccggattgagcaggaaggccggggagttctcctctacatgcgccaggaaggccggggcatcgggcttctcaataaactccgggcctatgaatttcaggaccagggcatggataccctggaagccaatctggctctgggttttccgggggatttgagggaatattttataggagcacagatattaagagacctgggagctaggagcctgcggcttctgaccaataacccggataaggtataccagctctcgggttttggcctggaaatcaaagaacgggtgcctatccggatggcgccaacggttcatgatctgttctatctaaagacaaaggagcagcgcatgggacatttaatgcactattaaaaacctgattcattattaagaaacttcattattaagaaactgccatctatccagaataggagaatccgccatgtatatattagaaggaaaacttgttcctaaaaaaataagggtaggcattgtcgcctcccgtttcaacgaattcattacctccaggcttctgtccggcgccctggactgcctgcggcgccatgaggtgccggaggacgatatcaccgtggcctgggttccgggcgcctttgagataccgctcatcgcctcccgcatggctgccagcagacggtatgacgctgtcatatgcctgggcgccgtaatccgtggcagcaccagccactatgactatgtgtgcagcgaggtctccaagggcattgcccaggcatcccttgccgccaaaatcccggttatgttcggcgtgctgaccactgaaaacattgagcaggccattgaacgtgccgggaccaaagcaggcaacaagggctatgactgcgctgcgggagccatcgagatggtaaatctgatacatgaactggacaaaagaacgacggataacagcttatccgtcacgcccttcgtccaggaggaaccttgccgcccatagcacgctgattataaatgcttcttcagctcatccagcactgcctccatatccagaggcttcaccagataaccgttcatgcctgcctcataggccctggccttatcctcctcaaaggcattggccgtcatggccagtatgggaattctgtccgtgttctcatcctccatggcgcggatggttctggtggcctccagtccgtccatccggggcatgcgtatatccatgagcacagcggaaaaatatccggcccctctggacttatacaggttcactgcctcctggccgtcctctgcggtttccacctccatgccccgcatctccagaagggttctggcaatctcacggttcagctcgttgtcatctgccagcagcacccggcagcccgaaaagtcctcccgctccttttcagcccccttctcttctgatcggttcactgcccgggcaaaagcatcgtatatggtactcccaaacaacggctttgaaatgaaacagtttacccccgcatttctggcctcatcctcgatgcggctccagtcgtaggcggatatcataataatggtggtatccggcccaactaaagcccgaatgcgcctggctgtttccacaccgtccatatcaggcatcttccagtcgatcatggcaatatcgtaatgcctgttctcttccagcagacgctgcacctcctccacagccctgaaaccggaatccacccagagggattgggccccggccttctcaagtatggatgtggcctggctgcccaccagcgggtcgtcatccaccaccagcacggccaggccctgaagcagctcccgcttctttctctggcgctccatctcctggtcatcctccgccagtttaaaaggcagtgtgaccgtaaatacggatcccttttctttctcactttccacctcaatgctgccgcccatgagctggaccagattatatacaatggaaagacccagaccgcttccaatgttgttgcgggctgtttccggcgcctcctgttcaaacggcatgaacaggcggctgcggaactccctggacatcccgattcctgtatccttcacctggaacctcagataggaaaatccattggtccgcttctgctcctcaatctgaatctgaatccttcctcctgcccgtgtgaatttcagcgcattggacagcaggttcatgagaatctgtttcaggcgcagcggatctcctatataaaactgctccaaaggctcgctgtggtaaatcacatactcaatctgccgctcttccgcctggggatatataatctgattcacctcgtccatcagctccgtaaaatcaaagtattcgtgggccagctccattttaccggtctcaatcttagacatatccaggatatcattaatcaaagagagcaggtacctggaggaagcgtcaattttacagaagcaatcctggacacttcttctgtcatctaacttcagctgcccgatggtgctcatacccacaatggcgttcatgggcgtgcggatgtcgtggctcattctggacagaaaatcggatttagcctggttagcagccttggccgatgccagggcatcccgcagcagctgctcctgccgggcctgctccgccctctggctgtccagcaccttcaccagttcaatggcaagcacatcgtcgttaaagggattctccacataaataatctgcacagacagccagtggtacttgccgtccattcccatcttctgaaactccatgtagatgtcccgttctccggcggcaaacctggccaggacgttctctctggcaaaggccgtttcaaaatcctcccgataggatggatacacatcgggaatatccccctttatcatctccgtgtagcttccacagcgcccggacagacaagcgtcctggtcctctataaaacaattataaatatcctttgtcaggttcaggctcataatcaggggataggccgtacagatcgccgccctgagtgaacggttctctatgagctgctgcctttcctgctccaactccagctgttttatatccgtcacatccgtaaagacagcctgtataacctcctggccgtccgcattgacaatacggcccatgatgacgctgatccatatctgcttcccatctctgctgaaggtatggcgtatataagatgccgtatccccattcagcgccagtccccctataatgccctcaatccactccttgtcttcatccagcaccatctgaaagggattctttacctcacgtctgtattcctcctcggagctatatccgtagagctcccaccccattcggttcacatttacaatccggtgcccttcccctctctcaaactgtataatgccgcagggcactgaattgtacagctggctcaggaaccgggcctgctgtatgtatttctgctcacgccggcgcagctccccctccagctccagataagtacgctttcctgattccgccggaaacagttcatcctcttgtatttcaccaaacggcatggagttgtggatatgaatggtctccagcgcctcacccttttcccggaaaataaaggtaattctctgctgtgtcctgatatacacgcctgttccctccctggactcaagctcactgacaccctcacaaagccacaggccggctcccatctccatgacttcgtactgctcatcaaacatattgcaggaagacagctcatcctttccttccctaaaccaggcggccacggcatcacgtccctctgccttctgcatctttccaccgcccagccatatgatatcatccgcaaatgtggatatgagaagttccacatcattctcacagaaatacgaagaaagaatgcgcctggcaaactcccttacttcttctgatgaccattttttcatttaaatcctcccctaatctgaagcatccggcatcctggaccagctgcggccccatatgaggattaccaaaaaagctgcccgctgatcaagaatgacccgaagggcagcaacgttcactctaatatatgatcctataacaaatccgaataaaatgcaaatccattcttaccttttctcttcaccgcatatgccgccttatccgctttctccaccagggcggcaatattagtcccatctgccggatacatggatatgccgatgctgcatgtaacgcagaagtcatggaaatccctgtccattacactgcggacagaggcacatatcctttggacacactgacgcacacccgccggtgagttgaccggatggagcagggcaaggaactcgtcccctccaacgcgcccgctcaggtccgacgctctcagtgttttcttaaggactcccgccacctcctgaagcagcaaatcccccttgatatggcccagggtgtcattgatcaccttaaaattatccaaatccataaacaggaccgcggctattccatcctccccttccagacgttccgcaatcatgtctttcaccgcctggttataaaggcctgtgagaggatcggtctgagcctgcataagagccctttggagaagcttgttctgacgcttctgttccagataaatgtccgtgacatcggtccttgtcatcagcaccatctggttctctttatcataataaagatactgcagcctctttcgggtataccccctctgagagtccataacgccgcagtaaaaacagtgttcccctgtccggtccagctcctccagcacgcggcttatacgcatttcacagattgccagctcctgatcctccggggctatgtatttcctcacatatgtctcaatggctttctcatagtcatcacagtgatcgggcggaagaagcgtaccgtcccctttgctgctgaacatgacatagctgttattcctggcattgagataaatgaaataatcgcagtggctgtatacataccgctccacaattccctttaagaggtgctgctcgctggtatcccgcatggccagatataccttgtccggcatatcctcccgcctgaacagcatggcgtttacctctgcccacctgaaggtttccccatccgcggaataccggacctccagggacatgttcttctgcccattaccccatacttcccgcatgtgtttaagggaaaaggttcctgcaaatatatccctgtccccgtgataaatgacgttgctgcataaatatcccaccatcctcccccactgaaaggagcgcagggccatgtccggcatagggatacactgaataatggtcccgattcccaggtccagatccagctcagcaatccctatataggcatccaggaacacaccaaacaaatcacggttcatctgcataagcctggccgcattccggctttcaatatccacagtgtaaaacagagccttatccctgccgcaggcatcacatgaaaaaagggttcccctgacccagcgttcacgtcctccctgctgcatcctccggaattccccctgttttccgattttatgggcacatacctcatccagactctgacggctgaacagtgccagaaaaccagccctgtcctcctcacagacaaataattctgccgctgcccggacatccatctcgcctgtcccgcaagccgcatccccctttcccggagtcaggaaaatgggcctgagaatcctttctgccacatccacttcaaagaattcatcgcaggcatccttaaggacaaatgcatatagatccattttcaccgggtccactaccacatggttcatattcattccctcccggcggccgtgtgcactgccgtttctaacgttctgtaatgtattatatgtattttatcatcatccccaccctccgtcaatgacccgccggcatggattggatgaaagaggaaccggacttcagggacaaaaaagatgtttcctccagggaatcatgcccggcggaaacatcctgtttcgcatacgctgcttcatttattacttcattatatattatttcataaatgtatggcctcatatatcatcattataataaacagtcccttcctccattacctgaaacaccccttgttccagggaaagaaccgtgactgcacagtttttctgaaccggccccttccagaacgcatccggggcaatcccgtctatgatgcacaccatttcccgtatcagggcgccgtgtccgcagaccagcacatggtccatctgttcctccagaggtttaagctcctgctccagaaactcccggcagcgctttctcaaatcatcataggtctccccgcccttagggggtacgtaggcggagggatgggaaaaataacggtgaagccgtaaaaacggcagtctgtgaatcaatgccagcagctggccctccctgtttccatagctgatttccaaaagcctggaatcctccatcaggggaagtccgcgctgtccgcttatgagctctgccgtgcgcctggcacgggacaatggactggtatagatccgtttaaatgggatatctttcattttctgtccggtgaggaaggccagggcctcccccttctcattgaggggaatatcggcctggccctgtatcttccccctgcggttccactccgtctctccatgtctaaccagataaaccttcaacctctcctcctgcctggttcattacatcctgataaccgccttgatcacctcatccttgtggttcaggctgtaatccactccctctatgacatccttaaaatcaaaggtatgggatacaatcttcttaagcggtataagtcccttgctgacagcactgatagcggacggatacaggttgcggtaacggtatacagagtaaatggttccctccatggcattcagcgtggctatatccagctccagtaccggctcaggcgaaacgcccacaagggtaatctttccggccctcttaatcagacggcatgtctgaagggtggtgatacggtttccggcgcactcatagacctggtccacgccgcctcccggaagcgttttcacaaactcctctatattctcatttctgctgttaaataccctggtagcccccagttccctggccttctccagacgcttatccagcacatccgccacatatatctcgctgactccccgtgcctttaaggacataagggtaacgaggccgatacacccagctcccagcaccactgccgtctctcccagctttgcattggacagctcacaagcgtgcatacccacggccagcggttccatgagaccgccctccatggtggagacattgtccggaagcttgaaggtcatgctggctgcatgggtacagtactctgaaaataccccgtccttctcgccgggaatagccataaaccgcacagacctgcagaggttataatgtcccttaaggcagtcctcacaatgaccgcagggaactcccggctccagggccaccctgtccccaatctcaaatccggtcacgccctctccgattgcgcttactactccgccaggctcatgtcccagcaccaggggaccgtccggcacccagttggccaggcgtccctctgaataaaagtgcaggtcggaaccgcacacgcctacatactccagtttaatctgcagttctcccggacctggctgtggaatctccctctcacaccactccattttcttttttcctgtcataaccgctactttcattgttccttccatatcaaagcccttctttcatttataatccaacggtttcctatatccttaaatattaggtactcctgttatgatctggtcagcacggtacctaccgcagccctccatccatcctgcttttgacgtctggcatcctggtccatggcgggttcaaacacgctccgcttcatctttccgaatatgcttctgtcaaagaatcccagggccagcccggccgcataggctgctccgataccagacagctcctccgcatccggtacaagaacccggatatcaagaatatcgctctgaaactgcatcagataccggttcctggtggggcctccgtccacccggagctcttcaatcctgactcccgcatcctggctcatggcctccaccacatccgcaatctgataggcaatacactccagtccggccttcaccagctccggtgttctggtcttgcgggtaatgccaacaatggctgccctggcctcgctgtcccagtaaggcgctccgatgcctgtaaaagcaggcaccagataggtggtatcatcctcattggcctgtctggcaagaccttctgtctcagaggcagtcgcaatcagcttcaaatcatccttcagccaggtaatgaccgctcctgtataattgatatttccctccagtacataattcaccctgccgtccatgccccaggccagggaggttaccacaccgtgggtacttatgaccggcttttctccaatgttcatcataatggaagagcccgtgccgtatgtagtcttaatcatccccttttccaggcagccctggccaaacagggctccgtgggaatcccccagcacgccgtggataggtatgggattgtccaggtaaccctctaaatccgtatccccaaaccatgcattggaatcgcacacctgggccagggcatttgcaggaatcccaaacagactgcacagcccctcatcccattccaggctgtgtatgttgaacagctgagtcctggaggcattggaataatctgttttaaaggatgctcctccggtcagccggtagaccaggtagctgtctatggtccccaggcaaagagttccctcggacgctttttgcggcgcctcctttacgttctccatgaaccacgccagttttgatgccggaaagtagggagacagattgattcctgttgtacggcgcacccattccgccttcccggactcctccacccgcgcacagatatcctttgccctggaacactgccacacaatggcatctgccagcggatggccgtctgtcctgtcccagacagccgacgtctccctctggttgctgattcccagccccgccacctgttctctgcgaatccccgccttttcaatcacatccctcaccaccttaagggtgttggagtagatttcatttaaatcatgggatacccaccctgcatcgtttataatctgccggtggggccggtctcccctgcatatcaggtttccctcccggtcaaacagcagggccttggttccctgggtgctctggtcaaccgataaaagatactgcttttccattgcttctcccttccttttagagctgtctcagattagagctgcctcagaagttcctgtacccttcgggcaattccctgcccggtcagaccgtagtattcaaacacctctgccgatgtgcccgtaatgacaggttcatccggaaggcttaagttcaccaccattcttggacaacaggcagataccacctggctcaccctggagcccagcccgccaaagggcgcgtgttcctccacagtcaccaccagcctggcttctccggctgcctttcggaccgcctcctcatccagaggcttcacacagtacatatccaccacacctgcgctgattcctgattccccaagcagacgccctgcatccagcgcaggctttaccatctccccgcaggcaatgattgccacatcccctccccgggaaaggaccgtggccttatccatggaaaagggtacatttccctcctcatagatatcctccaccgcgttcctgcccacacggatataggcaggcttatcgtcctttaacagctccttcaccaggcaggctgtctggaaacggtcgcttggaagataaaccctcatattaggtatggcggacagggccgatatgtcctgggccgaatggtggctcatgcccagcgctccgtagctgacgcctccgctgatgccgatgagctttacattggtattggaatacgctgcatccaccttaatctgttcatagcttctggtgctgagaaagcaggccggggaagccgcaaagggttttttaccgcattttgccagtcctgccgacacgctgaccagattttgttcagcaatgcccatttccacaaactggtccgggcaggcatccgcaaaaggagtcagggatgcggaacccctggaatcactgcacagcaccacaatatctttatcctcctttgcagcctccatcagcgtgtcacagatggccttcctgttgggtattttattcatgaagcagggcctcctttcttttttcaaaatcccggatgatttcactgtattcctgggctgtgggaaccttgtgatgccatgcagccttattctccatcacgggagagccgcacccctttactgtattggcgataagtacggtgggttttcctttcactgtcttggcttcctcgaaggctgcgtccagctggtctatgtcatttccgtccgccacgtcaatcacatgccatccaaagcttcggaaacgctcatgcaggtcatcgtggcccatgacatcctccgtacacccggaaatctgcagccggttcctgtccaccacggcgcacaggttatccaggcagtaatggctggctgccatggcgccttcccacacagagccctctgccagctccccgtcccccatgaccacatagacacggtagtccttccggtccatctttcccgccatggccattcccacacagaccggaagaccgtggcccagggaaccggaattcatctcgattcccggaagcttgttgttgggatgaccgatgaattttgagccgaattggctgaaagtggaaatgacctcctccatgggaaagaatccctttttcgccaataccgcataatagctttccacggaatggcctttgctgagcacaaagcggtcacggttgtccagatctttattttcagggcttatattcatctgtttcatatacagctccaccagaatctccatgacgctcatgtcgcccccgatatgcccgccctttcccgcgataatcatatccaccacatgttttctcaagtcatacgaaaggaccttaagttcgttcattttttcctccttctctactttaccgacttcctgaaccggtcaagacccactgccagcagaaggaccacgcccatgcacacctgctgccagtatgtgtttacattcaggatggtaagcccattctggagtacggagataaagatggctccaatcagggtacccaccatgcttccgataccgccctttgtgaggctggctccgcctatgacggcagcagcgattgcgtacatctcataggactggcctgcgatgggctggcctgaattcagacgccccatatacacgatgccgctgagcgccgcacagaatccagacagcacaaaggcagccagtgtgaccctttttacattgatgccggaaagccttgccgactctgaattatcacccaccgcgcagaccttgcgccctgccgtggtcttttgcagggccacatgccctataatatagacaatggcgatgagccagacgatatttggtatgtaaagtatacctcccatggcaaagctggtcattccctggggcagccccaccactgcctggcctcccgtatacaggtatgccattccccgaaacagccacatggtggaaagcgtcacgatgaagggcggaaagcccagataagccaccaggcttccgttaaacagtcccagcaggataccggtcagcagcacagccgccacgcccagtcccacattgccggttcccaccataagggtagcgcccacacaggaggacaatgccagggacgcgcccacggaaatatcaatgtttccggaaatgatgacataggtcatacccactgctatgatggcattggtaccgctctgaatcaggatgttcctgatattgctgggggtgagaaatatgttgctgagagcggtaaacaccactaccaggatgacaagccccagaacggttcccaggcttcctgtcaaaagttttttcaatgaaatattcttagctttatccactgcacttaccttcccttcgtcgtaatgtgcctgagcacattgttctgttctatctcttccgcttccaattcaccggttatctggcctttggacataacgataatacggtcgctgaccgataccagctcgttgacctccgaggaaatgacgatggctgcctttccctcctgcgccgcaaaattcctgattaactggtgtatctcggcctttgcggccacgtcgatgccccttgtgggctcatcgaagatgagaaggttgcagcctgcgtggagccacttggcaatggccaccttctgctggtttcccccgcttagatttaccacctgggtggcggatgtgcctttggttttcagcatttttatgtaattgtccgatacctcccggacccttttccagttcatgaacccgcgtctgctgaccgccgtcatgtcacagtgaatggtattttcctcgatcttcagccccagggacagtccgtcctccttgcggttctcactcaggtatcccagccccgcatcaatggcctgtctggtattcgtaatccgcctggcctttccggaaacctttataacgccgccctttaaagggtccgcgccgcataccatccgggccagttctgtccgcttggaacctaccagtcccccgattcccagcacctccccctggtatacagtcaggttcaaatcctggatgaatccgccgtccgtaatatgctccagctccagaagaggaatgctttttgccttgtcccgtctggtgcgcccgcctcccattggctggctaagcacctttccgctcatcatcataatgacatcgtccggcgtgctggtcctgacatcggatgagcccaccagttttccgtctctcatgacgattgccctgtcgcatatcctgaatatctcatccagacggtgggatatgtatatggtggtgattcctctggcctttaaggtcccgataatttcaaagagctgttctgattcctcatgggtcagggaggtggtgggttcatccataataagcaccttacagtccacggccagggccttggctatctccaccatctgcttttccggcagggacaaatcccctacccggcccctggggtcaatgtgtcccgcattcagcttcgccagctgttcctttgtatccgcgtacattttcctgaaatcaatgaggtttcccaccttcctgggctcatgggacacatatacattttccatgacattcatctctgacataaggcttaattcctggtagatgatagccacaccgaatcccctggcctccagggtggaatactgtttgggaaggggacgtccgtccaggacgatgtcccctccatcccgcgtataggcaccgcttaaaattttcatcagcgtggacttgcccgcaccgttctcccccatgagggcgactacctcgccctcatagaagtccatggaaacatcgtccagggccctgacgcccggaaattccttcacaatatgcttaaactccaatataggtttggaatgttccatattttacttctccaatccgcccgttcccggggctgttcttcctggcagttccctgattttaatatcccttttcggtaagacctctgagcgggaaccgctctgcggcgtactcataaatggtctggtctgtcagcccgtccacaaactcgcctgtaaccagggtgcagtcataaaggatttccctgtcgtagtggtaatcactgttcataaccagagctgttgccagtttcacgcccatggcgccttcatccaggttaggaagtgacacaaacgcatccagatcaccgtccatggtcatgttcaccgcatccagaattccgtcatatcccaccagaatcaggtcatctgccttcttgcccgctgccttggccgcattgaccatgcccactgccatctggtcgttgcaggcaaatatggcttttacgttgggattcgctgtcaggatgttggtagtcacgtcagccgccttatcgctggaccactcggctccctgttccgcaaccaccttgattcccggatattccgcacaggcctgcatgaatccggcatgacggtcaacgcctgtggactgttccatcagtcctgtgatgatagcaacctcgccttccccgcccagctgctcgcatatgtactttcctgccttgtaggctccagccacatcgtcgccgcccacaaaagcgtcaatcacgcttgtatcgctgattcgcgtatcaaagttcactatttttattcctgcttccctggccttcttgatggccggaatcacgccgtccgagctggccgccgagaccacaatggcgtctgccttcttctcaatggcagcctcaatcatggatacctgcttctccaggtccacttcctcctggggaatggcaatggtcaggtccacgcccagattatctgctgtctgctgcgcaaaatcagatacggaaatccaccagggattgttcaatgtctttcccacccagtaaacgctgataccctcttttttctcagttcccgcttccgcctccttggcattgtcattggtggcggatgccgcttccaatccattggacgtacaggctgccagactcaggaccgccagaccggttaacaggatgcttactactcttttcttcattgtgttcctccttttgatgtgagaaaaatggtttctgcacatatgccctgtgatttaactaaatttaattaagttgttgttttgtgcattataaccatttattctctttgttaatgggtttccttgtgcttgttacacgtaatatagcaggttatacctttggtgtcaatagtttttcactaaattttaattaatttagttaaatcaaaaataaatttttaacgatatttacttaatataattaagttcacaagggttaaagacaaaaaaagagcatatacagcattaaacgccgtacatgcttctgcatatcttctgtttttgatttggtttaatccgttatttttttcacacttccgcgtttcaccaggctggttcctatctccaccttcagggactgttctctcccctggtccaggcgggaaatcagcagatccacggcagccggtccaaatatatcctttggcacgttaatcgtggtcagctgaggctccaccagggtactgatgggccggttgtcaaaccccaccacggaaatatcctccggtatccggtatccgcattcctgcatggccctgattgcgctgcatccaatcaggtcattttccgcaaagaaagccgtgggaaggcgtttgcggccctccaggtatttcttcacgtcccgcttcacatcctcctcggaataccccacgtcaaccacatactccttgttgaaaatgcctcccaggctcctgagcttgtgcttgaaggcattataccgctcgtcaaagctgttgatcctgaccttgctgcggatatatccaatctcccggtgccccatgccgcacagataggacaccgccttgctggtaccctgtacattgttgatggacaccgcatccacatcgttttcctgaaatgagttgtccaggatggcaaatggaatctgggattccttgaacaactggaggtcgtcataatacatttccaccgcaaagatgatgaggcctttatatccgcctgatttaatctggtgttcctgctccgtcctgggcatggttttattgatgtagaggaagttaagggtatatccataatggttgatacggttattgattccctccaggatatatgtgaaaaaaggggactcatccacgatgctcccctcacgtttatagaccacgaacccaatggaaccattattgattctctgttccttcagcatgtatccgcagtccatttcttttattttctgaatgatttcctgacggcgtttctcacccacccctggtttgttgtttaataccagagaaaccgtagccgtggacacccccagcatttccgctatatcttttgctctcagcgccatttgcagaccccctttgccatacaattaagttgattttactaaattattaactaaattgcaataccaaaaggcattccggatatgtccacgcatctccggacatatccgcaacagcgctaaattcttccgctgcccatctccagcagcttcgcgctcccgctctcaagggtggccctaagattcagaatgcgctggttggacgatccccggaaggggaggctgatatccttaagggcctccataaaccgcccgtccaccagcacgtcaatcatggacagcatccggtccgtatagccgcacctggcccggctgtccctcagaaggtcctgttccagggtatatcccgtatagcaccacaggttcttctgcggatagcactctctcaccttttccaaaaaaggcaccagcgccttctggttctccggctcaaagggctctccccccagaagggtgaggccctctatataatccggcgcaagggcgtccaggatttcctcctccgtctcccctgtaaagggtttcccgaagccgaaatcccacgcctcttcgttaaaacagcccggacagtggtgggtacaccctgacacaaacagggataccctcacgcctacgccgttggcaatatcgttcttcttgattgtaccgtaattcatcttataaatggagcaccctttccttgatttcctgggtcctgccctggttccagaactgagttccgatgtagccgcaggttctcctggccacattcagcttgttctcgtcccggttgccgcacttggggcattcccacaccagcttgccgctctcatccgtcacgatctgaatctcgccgtcaaacccgcactcctggcagaaatcgctcttggtatttaactctgcgtacatgatattgtcgtagatataccgtatgatccccagcacggccggaatattgttctgcatgttgggtacctccacgtagctgatggctccgcctgtggaaagagcctggaactgcgactcaaatttcagctttgagaaggcatctatttcctcggaaacatttacgtgatagctgttggtgatatagcttctgtccgtcacgccctctatgatgccgaaacgcttctggaggcatttggcaaacttataggtagtgctctctatgggcgatccatagatgctgaacccgatgttagtctcatccttccagcggttgcaggccttattcatgtactccatgacctccagggcaaagggagtagtctcctggtcggtatgggactttccggtcatgtacttcacgcactcatagagtcccgcatatcccagggaaatggtggaatagcctccgtaaaggagcctgtcaatggtttcacccttcttaagccttgccagggcgccgttctgccagagaatgggcgccgcatcggacagcgtgcctctcagacggttgtggcggcacatcagtgcccggtagcaaagatccagcctctcgtcaaaaatcttccagaaagccttcatgtctccgccagaggacagggccacatccaccaggttaatggtcaccactccctggttgaaacggccgtagaatttataatttccattttcatccttccaggggcttaaggcgctgcggcatcccatgacagggaagcagttaccttcctttaattccatcatcttcttctcggaaatatagtcgggaacaaggcgcttggccgtacatttggcagccatctcggtcaggtaataatactcggttccctcgttgacattgtcctcctccagcacataaatcagcttgggaaatgccggagtaatccacacgcccgactcattcttcaccccctggtagcgctgcttcagagtctcctcgataatcatggccaggtcctttttctcccgctcgttcttagcctcattcaagtacatgaacacggtcaggaagggggcctgtccgttggtggtcatcagcgtgatgacctgatactggatggtctggacacccttggtaacctccttgcggagcctgttttccaccacttcgtgtatggcttcctcggaaggcatgcagccaaaggtcttaacctcctcctggacctccgcgtatattttctttctggatacgtccacaaagggagccagatgggccaggctgatgctctgcccgccatactggttgctggctacctgggcgataatctgagtggcgatgttgcaggccgtggaaaagctgtggggcttctcaatcctggtctcgctgataaccgtgccgttctgcagcatgtcctccaggttcaccaggtcgcagttgtgcatgtgctgggcaaaataatcggagtcatggaaatggatgatgccctccttgtcagcctccacgatgtcctggggaaggagcatcctcttggtcaggtccttgctgacctccccggccatgtaatccctctgcacactgttgaccgttggattcttgttggaattctcctgcttcacatcctcattattgcactcaatcagggacagaatgcggttatccgttgtattggccttgcgtataagggagcgctgatagcggtatctcacataatcctttgcaagctcaaatgcgcctgtagacatgatctggttctccaccatatcctggatctcctcaacggacacagccctgttaagctttacacacttgtactccacataatccgcaatgtccttaatctgctccagactcagcttgttttttccggcagccgtattggcctttgccacagccaccacgatcttattgttgtcaaaatcctcttccgcgccattcctcttaataatcttcatcgtcactacactccttttatcctaatgctctccctcgctgcctgtcttcaggtaaacggtttaaaggcatcttatcacagaattctggaaaaatctgttgcttgtgcaacagtataagattttaccactaaatgttgtgtttttcaagaggaagtatacgataagatgtatttcagaaaaataagacaattggctgaaatcccggccgaacctggtgatatgtctgacagcaaaaaggcgcccaggcagtcacctgcctgggatgtattatactgttccagtatctcaatcaccgcagaaccctccggctcccgtgcagctctcccgctccaccatgtggtggggaacaatgattttcgttgccaccagctccggattttccacatggcttatcatctgggcggctgcctcgattcccagctggcaggcattcacatccacggatgtcaggggcggaaaggtgagtctggcgagaagggaattgttaaaggacaggatggacacatcccccggtatggacagccccagaccaatacatgccttctccagggccactgccagtatgtcgtcgctgaccagtacggccgtgggtctgtcctcccttgcgaacagggccgccagggcctggtcctggtcctccggcacagaaggcacctccacgcacagctggccgtcaaaaggaataccccgctctgccagggccagcatataccccattttcctgtcgtggttataaagaagagaatggtccccggacaggcaggcaatccttacatggcccagatttaacaggtactccgccgcctccctgcccgcaagcacattgtcgttatccacatagatggtctggttcacattccggcacgcttttccaatgagcacatacagcagtccctcttcatagagataatccagaaccgggtcctgctccctggagtagagcacgataaatccctctgccaggccggttctcgccatggtctttatggcctggaggatctcatcctcattctgtcccgtaatcacggtattgatgtactgcttctggttgcagtactggctgattccccgtatcatctccagatagaatggattctggtaagcctcccactccgacgggggcagaatgattcccacggtgcgggaattctgggtcgccagactgctggcctgaaaattcggttcatagcccagcttcgccatggcctgcctgaccttttccttggtctggcggctgatagagggatggtccttgcaagtacggcttacggtggatggcgacacccctgcaagggcagccacgtctttgattgtaacaggcataaacagcctccttaatatgcgtctcattttcatcgtcacagggatatatatgaacctatggtccggatccgctctcaggctccttccaccagttccatcaccgcagttcatacacgcccttcctatattgtaaagtttaatgcaatttttgtcaactcgtttgcgctctgtttgcgcaatcttcccctgactttttgcattccgctccggaaaaattgcacaaatacctgagagtatttttgtccaaaacgtagaaaacacaggattttgaaaatatctattgcattcttcatgcagccagactatatttaatgcaagcggttgtgcaaacagtgcaacaattaaactcaggaggttacatatgaacaagaacactgacggctgtattggaatcaggattctctcccctttaactggaacagcggtccctttggaggaagtgccggaccctgtattctcacagaaaatcataggagacggcgttgctatcctgccccgggacggcaatctggtcagtcccattgacggggaggtggtttccatagcagagaccctccatgcctatggcctgcgttccgaggacggcatcgaggtcatggtccacttcggtctggagaccgtggccttaaagggagaatgcttccagtgctgtgtaaagatcggagataaggtgaaggccggcagccttctggcaaaggccgacttaaaagcccttgaagaaaaacaggtcaacaccatcacgcctgtccttatctgcggcggaatggaaggccgttccatgaatgccttcacaggtcctgtaaaggcaggagcagatactgtgataacggttttagaccattgcccgccggacgcagccgaagaagctgatgcagcctccccccataatccggacactgccccagctgcaaatacgtcttcccccgcagacgctgcggacaggaaagccggaaagcccaaaaaatccctgatcaattttgactttctccaaaagctgggcaaggtcctgatgacagtcattgccgtcatgcccgcagccggactgatgatcagcgtaggaaagctcatacagatggccggcggggatatgggagctgtccttacaatcggaagcaccatggagaccataggctgggccgtaatcaacaacctgcacattctgtttgctgttgccatcggcggctcctgggcaaaggaacgggccggcggcgcttttgcggctgtcattgcctttatcctcatcaatgttattaccggcgctctctttggtgtcagcagcgccgacttaaacgaccctgccgccgtgacccggaccctgctgggccaggaaatcctggtaaacggatacttcacctcggtcctgggagctcccgcgctgaacatgggcgtgttcgtgggcattatatcaggctttgcaggaggagttatttacaataaatattacaattacaggaagctgccggacgccctggccttctttaacggaaaacgctttgttcccatggtagtcatcctctggtccgtcatcatctcactggtgctggccattgtctggcctgtggttcagaccggcatcaactccttcggcgtgtggattgccaactcctcctccacctcgcctgtgctggccccctttatctacggaaccctggaaaggcttctcctccccttcggcctgcaccatatgctgaccatacccatgaattacacctccttcggaggcacgtacaccatcctcacgggcgtcaacgcaggttcccaggtttttggtcaggatccgctgtggctggcctgggcaacagaccttatcaaccttaaggacgcgggagacatggccgggtaccagaacctgctggccaccatcacccctgcccgtttcaaggtaggacagatgattggcgccactggccttcttctgggcattgccctggccatgtaccgccgcgtggacccggataagcgccgcaattaccgctccatgttcatctccactgtactggccgtatttctcacaggtgtcacagagcctctggaattcatgtttatgttctgcgcccttccgctgtatctggtatacgcagtgctgcagggatgcgcttttgccatggccggcctcatccacctcaggcttcattcctttggcaacctggaattcctgacgcgtgttcccatgtccatccgcgcaggacttggcggagacctggtaaacttcatcctctgtgtggctgtattctttgccgcaggatacgcaatcgcctattttatgataggaaggttccattttgccaccccgggcagactgggcaactataccgacgactctgtctcagagaacagccagggccgggccggttttgcatcatccggtgacagccaggccggacgcatcatctcccttctgggcggcagggataacattgtcctggtggacgcctgcatgacccgtctgcgcgtcacggtaaaggacgtggataaggttgccggactgccccaatggaaggcagagggcgccatgggtctgattaaaaaggacggtggcatccaggccatctacggaccgaaagcagatgtgctcaaatccgatatcaatgatatactgtaaacaggccgctgccatccacccaccgcagctgccttctgtaactgaaaaccaccggaggcaggtagtatgaaaataatgacacttaacacacacagtctggcggagccggaatatgaatccaagctcgccgcctttgccggatcccttgtccaaatcaaaccggatatcatagccctccaggaggtcaaccagtccaggagcgctccgcccgcagcctccggctggctgcgggaatccggctatgttccctgctgtgccaaagacttaaacacagtctccccctgcgcctcccgggcagtcatacgcgcagacaaccacgcccttaacctggcgttgctcctggcccgggccggtgtttcctaccagtggacctggaccccggccaaggtaggatacgggatatacgacgagggtctggccgtcctcagccgttcccccatactggggaccagccagttttacatcaccggcatccgggattatgaaaactggaaaacccgaaaaatacttggaatcaacacccggacagaatacggaaatgaatatttttacagtgtccacatgggttggtggaatgacagcgaagaaccctttgagggacaatggaaccgcataagcagcggcctgtcccccttagcagaagaacgtctgtggctcatgggggatttcaactcaccggcccacataaccggccagggacgggacctgattctggcctcaggctggtttgacgcatatgacctggctgcttccagggattcaggcgtcactgtggcaaatgccattgacggatggcgggaacagggagagataccgggaatgcgtattgattacatctggaccagccgcagggtgccggttatttcctcccgaaccatatacgacggcacatcctttcccgttgtatcagaccattttggaatcatcacagaatattaaacaggacaatgcctgcaaaaaggagcatatagatatgaaacgagaaagcggaatcttactatccatcaccagccttccctccaaatacggaatcggctgcttttcaaaggaggcctacgaattcgtggaccgtttaaaggaggccggccagtcctactggcagattctccccctggggcccaccagttacggggattccccctaccagtccttttccacctttgcaggcaatccctatttcattagtctggaggaccttatacaggaaggcgtccttacagaggaagaatgcagccgggctgacttcggcagccggccggattttgtggactatgcaaaggtctacgaagagcggtaccccctgctgagaaaagcctatgagaggagcagcataagcctggacccggagtttcggaaattcagggatgaaaacagatggtggctgcaggattacgcccttttcatggcagtaaaggcccggttcaaaggaactgcctggacccggtgggcacaggacatccgcctgcgctggcagaacgccctggattactaccggagggagctatactacgacatagaattccatcaataccttcagttcaaattcagccagcagtggaaaaaactaaaatcctatgccaatgccaacggaatccgcatcataggggacattcccatctatgtggccatggacagcgccgacacatgggcccatcctgaactctttgagctggaccgggacaatataccgaccgcagttgcaggctgccctcctgacggcttttccgccacaggacagctctggggaaatcccctgtaccgctgggaataccaccgcagcacaggctatgaatggtggctggccaggctggcctactgctataaactgtatgatgtggtaaggattgaccatttccgcggatttgaccagtactactccattccggccggctccggcactgccgtcggaggccattgggagcagggaccgggaatcggcttcttccacaccgtgcgcagcgccctgggagaaaaggaaatcattgccgaggatctgggatacgtgacagactccgtcaggcagcttgtaaaggacagcggattcccgggcatgaaggtactggaattcgcctttgattccagggattccggctgcgccagcgattatcttccccataactaccctgaaaactgtgtggcctacaccggcacccatgacaatgaaacaatcaaaggatggtatgcctccatcacagcccaggaacggaagctggccagggattatctctgtgacagctgtacccccgccagccgtctgcacatgtcctttatcagcctgattatgcgcagccaggccagaatgtgcatcatcccccttcaggattatatgggcctggacaatgactgccgcatcaacaccccctccactgtgggcaccaactggagatggcgccttcttcccggccagatgtcggatccgttagtgaaaaccatttcctccgtcacactgcgctacgggcgctggaactggtgatatgtaaagctgccgcaggccaaatccatgagaatttggcctgcggcattaacctgtctatatttagaaattatttacaattaaattcatcagtatatggcccgttccctcaccagcacagtgggatatcccatgtttcttaagttcctctccatctgtaccgcatagtccatattgaggaaagcgccaacccttaccttgtacagtccgtcgtcgtaaaccaggaaggccggaaggccgctggcctggagttcattcaccagcctgtctgccggcatcctggtgcggaaggctcctacctggacctgataatattccggtctctgcgcctcctgctgccggatggtttccagcacaccgtctgctatggcctgggcaatggcatcgaaattctcatcaaaaaaccggttgtcatccggattatcaataaatcccgcttccaccagcacagcaggcatctgtgtctttcgcagcacgataagaccggggcgctcctgtactcccaggtccctgaaccctgtttccaccagattgcgctggatattatccgccagcatggccggcacacctgcatcctcatacaccagcgtcatggcgccgcttgcagttcccggtaccgggaatgcattccggtgaatggacacaaaataatcggcccctgactggtttgctatccgggctttctcaagaggcgtgtcgtatacatccgtggtccttgtatataccacatccaccccattattttccaatatccgtcctatggcaagagccagccgcagggtatcgtctttttcccggcgcccgtcgtacatggcgcccggctcttcgccgccgtggccggcatcaattatgactctcttaacatctgtcataccagattctccttcatatatgactctacattataccatatgtgaaagtaagacaaatgttgactgaacctggaactaaatttcgtccacatccactcctctgggaccaacatgggtggaaaatacgatttgtgtgcttgtcctgccgaatttctgcagctgtcctatgaacatatccagctccatggtactcttaaaggctacctttaacagcatggaaaatcctccggtgacacagctgcactccagtatatggggcacctcccgggcataggcatagaactgctccttgtcctcgggtatcacctccaggttaatgtatgccagtatgtgataccccagcttcaccgggtccacagaggcatggtagcctgttatgataccctccttttccaggcgttcaatcctggctgataccgccggagaggatagaaacgtattctctgcgatggtctttagggaaacccttgcattgtcctgtaaaagctttagtatcttgcggtcaatctcatccatattacccttttcctccctgttctcctgcccctgttaccgcctgagggcctttatccgttttacagcctccaccgtattctcgtaggttccaaaggccgtcaggcggaaataaccctcgccgccgggcccgaagccgcttcccggtgttcccaccacattggcctgttccagaagatagtcaaaaaactcccagctgtccatcccgtcctccaccttaagccagatgtagggcgaattgattcccccaaatacggtgtagcccgcctccttaagcccttcatagataaccatggcattcctcttataatacgccacctgctccatgacctgccggctgccctcttcggaatatacggcctcaccggctctctgctcaatatagggggctccgttgaacttggtgccgtggcgtctggcccacaatgaatgcagcattacatccccgcacttcaaatccttcggaaccacggtaaatcccagacgaacgcctgtgaacccggcttttttcgagaaggaacggaactcaatggcacaggttctggctccctctatctcaaatatgctgtgaggcacatcctcctcggatatataagcctcgtaagcagcatcatagagaatcacggcccctgccctgtttgcatagtccacccacacctttaactggtccctggtcagcgtggtgcctgtggggttattgggcacacacaggtaaataagatccggcgtctcctgcggaagctccggcacaaaatgattctgcgccgtacagggcatgtagatcacattgctccacatgcccgtgtcagggtcatagctgcctgtacggcccgccatgacattggaatccacatacacgggatacacagggtcgcacaccgcaatgcggctgtcctcgctgaatatctcctggatattaccgcagtcgcttttggctccgtccgatacaaatatctcgtctgcctccacatggcagccccataacctgtaatccttttccacaatggtctcccgtaaaaaggcataacccaaatccggcgcatagccgtgaaatgtcttggcctgtcccatctcgtccgccgccttgtgaatggcttccacaatggccggggcaatgggaagtgtcacatccccgattcccagccgtataacctgcctgtccgggttagcctcttcatatgcagccacttttttcgcaatggcggaaaagagatagcttcccggcagcttcaaataattctcgttgatcttaaacatgtgtgcttcctcctggcctctgcctgtctgaaatatgaaaacacccccaaaaaccggatacgccctttgccgcaggatacagccccatgtcttttccatgtccgccgccgtgccgcaaaaggtgtaccaggacgcgcgccgtcgcgcgtctggttcctgagagtgtatattgaacatttttcgctttaaagtattaactgataaaatttgccttatcaatcataatatatttcttcgggtatgtcaatagagccccggaacacctccacggccggccctgtcataaacagatggcccgactccctttcataccgtatcaccagttttcctccgcgcagagccacctccgcctcatcctccgtatatcccatgaggatggaggccatgacgctggccgtggcgcctgtgccgcacgcccaggtttcgccgcttccccgctcccacacccgcatctcaaggtgcttacggtccgccacatggataaactccgtattcacacggtcaggcgcgaaccgctcatggttctcaaaggccggtccaatccgctccaaatccagacagtccacctggtccacataatagattgcatggggatttcccacgttgattcctacaaaccggtattccttcccgtctaccgtgatatcctccggcagcctggatgtgagggctgcttcccccatgtccacggtaacggacactgcctttccatcctcaatttccagctccagcgtcttgatccctgccagtgtctccactgtgatggtccttttatccctatccaccagaccatggtcgtaaacgtatttacccacgcagcgcacaccgttgccgcacatgattccctgggacccgtccgcgttgtacatctccattctgcagtccgctgtccgggaggggcatatgagaatcaatccgtcggacccgatgccgaaatggcggtcgctcacatagatggctgtctttgccggatccctcaccgtctccttaaaacagtccacatacacataatcattacctgttccctgcatttttgtaaattccatatccgtctccatcctgccgtattaccggcattctaatcattctttcccttatccgtccccgtcacacatggatgaggctgattaccatctgtgctgtctccaccagattggtgccgctgtccatgctgcatttctgtatatatctgtgggcttccgactccgtcatattgttccgttccatcagcagcgtctttgcctctgttatgatatcctgctcctccctgctgcgctcctttggcctgcttcttctccttctgcggatcctctcctgggcctgcaccatcatctccagggtatttaagaggtcgtggaccttaaggggcatgggcaggcagataaccctgtccgggcactgtccgccccacctggcaggcgatgaaatcagaagcatgtcaaaatctcccggcaggcactggcgcagctcgtcgtacatcatatcctcaaaccggtaaccgctcaccacgattcccccgttcagacagtccgcagccgacagggcctgaccgcctgaggtgcagactgccactacctggaaaccgtttcggaccaatatgctctttatattcttcccgtcctccggcttggaaaacgctacgatgatgttagtcacatgtcccacctccaggtaaaaccttattcacaactgccggcgccatcagtatttatacagatactggctcacttcccaatccgttacctgagcccggaaatccctccattcctgctccttggcctccagatatttggtgtaaatgtgctctcccagcacctccttcataaaaacatccccgctgtatgcctcgatggcgtcccccagggtttcgggaatccgctctacgttccgttccctcagttcctccggctccatggtgaacatatttccctctacacatgcaggaagtccggttttcttttcaattccgtccagtcccgccgacagacaggccgccagggccagatacggattcatggcagaatccgggcaccgcagttcaatgcgcgtactctcccctctgggggatggtatacgaatcagggaactgcggttggaggtaggtgaccaggcaatataaatgggcgcatcgaatcccggaatcagccgtttataggaattcacaagcggatttgtcaggatggtcatggccttcatgtgcttaagaatgccggccatgaaataataggcgtccctgctcagcctcaaagcatcctggtcatccgcaaacaggttcctgccctccttgtctgacagcgacatattgatatgcatgccggatccgttcataccctctctgggcttcggcataaaggtggcatggagtccgtggcgctttgctatggtctttgccgccatcttaaaggtcatgatattgtccgcagcccgaagcgcgtccgtgtactggaaatcaatctcatgctgggccggcgcaatctcatgatggctggcctccacctgaaatcccatctcctccaggttcagcacaatatccctgcggacattttccgccaggtcaatgggagacacgtcaaaatatcccgccatctcatgtgtgctggtagtgggccttccctcctcgtccgtgtgaaagagaaagaattcacattccggacccacattgagcacatatcccatgtcctgcgcccgcttgacagcccgtttgagcacatacctcggatcgccggaaaacggggtcccgtccgggttatacacgtcgcagataaacctggccaccttgccctgctggggcctccacggaaagacctcaaaggtatccaaatccggatacaggtacatatccgactcgtcaatcctcacaaacccttcaatggcagatccgtcgaacatgcagcggttatccaacgccttttcaagctggctggcggtgatggccacattcttaagcattccgaagatatccgtaaactggaggcggataaactccacatcctcctcttccaccatacgcatgatgtcctctttactgtatttgctcataataatctccctctcttgcaaactgtgatacccacaaacacgcagaggcgggaacctattaccatgctcccgcctccttaaaatccaccgggcagggacagagcccccttaagacgccctcgtcatccttcccttacccctgctttttgttataaaaaatatatcagcagatatttcatttgtcaatgaatttcctctatttttttgatatcactttaacgcgcgaagctgttctgtgaaatggcttcccagtttgacggcacccacatatcccacatctccggtcatgtggaccacaccttccccgtcaatctccagctccagggtgcctcccggcatctgcacaaacatcttgggatccgtaagccccagacggtaggccgcagccgcagccgcacagcagccgctgccggaagccagtgtgtagcccgctccccgttcgtacacttcggtctggatatgggtccggtccagtaccttcatgatttgtgtgttgattttctccgggaactgcctggcgctctcagaataccttccaatcctgcacaccaaatcctttgaaatctcatccataaggataacgcagtggggattgccgatggacaggcaggtaacaggatagggaatccggccaaacaccatggtctcgttgatgatttccctgcggggtccctccaccggcacatcgtcgctccagaaggatacctttcccatggatgcctttaaccgggtgccctcctcgttcagataatggatggacgcctcgccgccctgggaggaaatggtaaaatcttttttctgtacataccctgcgtcctttaaatatttggcaaaaatccggaccccgtttccgctcttttgcgccacactgccgtccggattccataccaccatggaaatctgctcaccgtccagaacaggtccctccagaatcccgtcggcacccaccccgaaattgcggttgcacataagctgtacattggaaggggtcagcttcagtttgtttttattggggtcgtataccagataatcatttcccagtccatgatatttttccactacaatcctcatatagatatcctccctgtctgcggtctgttttagcggtactcattgccggctcctgactcactccgccggctgttaactttaccattattttatcaagcattttttgataataatatagatatattgctattttatattgcaaataatgctgtatttattttatacttaaaatatccccacaaacgatgtttccatcacacggagacacggcatgcaaaaaggaggtaacggttccatgcccatcacagatgacgcccctgcgtttgagcgccagggattcctgaaagaggacttccggctgttccatttaaaagataaggtaagtccctgctatgaattccactatcacgatttcctgaaaatcatggtgctgctggagggaaaggtcaactatgtcatagaaggacgctcctattcccttcacccctttgatattgtgctggtggggcgggggcagatccaccggcccgaggtggactcggggcagccctatgagcggcagatcctttacctgtcccaggattttctggaccggcacagagaaaacgaagattccctggaccggtgttttgccacggcagcctaccgtcattctaatgttctcaggctgaagaaggaggtccgggcgaacatgctctcccttttaaagcagctggaacgctcccagaactggcagcaggaagagtttgccggtcccctcatgagccgccttttatgcctggaatttctggtggagctgaacagggcctccatggatgacaaggcccagtaccttcccacgggtgtcttaaactaccgggtctccggccttatatcctatataaatgaacatctggacgaggacctgagcatcgggacactgtcctccttaagctgcatcagcccgtaccatatgatgcgtattttcaaagaagaaacaggatgtaccataggaaattacatcaccgaaaagcgcctgatttatgccagggacctgctgggtgagggggtaaatgccacggacgcctgcttccgttccggcttcagccattactccacctttctcagggcctacaaaaatcacttccaacagctgccaaaacggaatcctggcactaaaatataaagtatttcctgaattttcttgaattttttctgatttctgttataatatactcattgttttcctattgaggacagttgtctttgtgaggtgaacacgcaaaacaaactggtccgggataaattcaatgaaacaggaggaatgtattatgagaatcagaaaagtagcagcagtgaccatggcggcatgcctggcagccagtgccctggcagggtgcggcagcaagaaatcagacgaaaaagtcatcaaaatcggcgtgttcgagccgaccaccggtgagaacggaggcggaggctatcaggaagtactgggtatccgctatgccaacgagatgcaccccaccgtcaacataggcggcgaagaatatgctgtcaggctggtggaggtagataacaaatccgataagaccgaggctgtgaacgcggcccagaagctggtaagcgaaaaggtcagcgtggtgctgggaagctacggctccggcgtgtccattgcagccggacagatcttcgcagacgccaagattccggccatcggctgttcctgtaccaacccacaggtaaccgagggaaatgattattatttccgtgtatgcttcatcgaccccttccagggcacggtcatggcgaattacgcattccagaacggcgcaaagagcgctgccgtgattacccagctgggcgatgactattcctctggtcttggatcctattttaaggaagcctttgcaaaattgggcggcaacattgtcagcgaggaacagttccagacaaaccagactgatttcaaggccatcctgaccaacataaaggcggctgaccccgacatcatctttgccccgtcctccatcaccactgccccgttaatcatcaagcaggccagggagctgggaatcacggctaccattgctgccggcgatacatgggagaactccaccatcatcgagaacgcgggcgccgactctgaaggagtcgtaatctccaccttctttgacgaggcggaaccggctaacgacgaggctgcggccttcatcaagggcttcaaggaatatctggtaaaggaaaagcaggaagacattatcccggctgtctccgccctgggttacgattcctacctggctgccatcaaggccatagaggacgcaggatccaccgataccaccgccatccgcgacgcccttaagaatgtagagattgacggcgtaacaggaaacatcacatttaatgagaccggcgatgccaacaaagatatcgcgttcattaagaccatcaaggacggcaggttccagttcctgaccaccactactgtggaatagggcatctggcgaattacatatggatacagggctgcaggtggcaaacgctgctgccttcagtcttaaccagccttggacgttccagggctggttgcatgttttaacggatttctggatacggaccttactataaaaacacaggaggcagactcatatgagtttaacaacatttcttcagcaatgcctgaccggcatctcccttggcggggcctatgcgctcattgccataggctataccctggtctacggcatcctccgcctcatcaatttcgctcacggcgatatcttcatgatggccggatactttatgatttttgcaatggcaagcctgccatggttcattgccattcccgtcaccctgattgtgaccattcttctgggcgtcaccatagagcgggtggcctaccgccccttgcgatccgcacccagaatgtctgttatgatttcagccatcggcgtttcctaccttttgcagaatctggccacctacctctttaccgccctgcccaaagggtatccggagattcctttcttaaagaaaatcttccggataggcggactgtccgcctcctttgtcaccttcctgacccctgtcctgaccctggtgctggtctatcttctcattctgctgattaaccacaccaaaataggcatggccatgagggcggtttccaaggattacgagacagcctcccttatgggcattaaaatcaataagaccatcacctttaccttcgcagtggggtccctgctggccggtatcggatccattttatattttacggaccgtatgaccgtattccccttctccggcgcccttccgggcttaaaatgctttgtggctgccgtgttcggaggaatcggcagcattcccggagctgtcatcggaggctttatcctggggcttggagagacagccctggtggccatgggacagtctaccttcagcgatgcatttacgtttatcctgttgattgtcatgcttctcatccgtcccacaggactctttggtgagaagacgaccgataaagtgtgaggtggcggacatgaagaatatgacaaagaacaagaacaaactatataccctcattgccctggtaataatcatcggtttccttgcattcctgcagtctgacactgccgaatacagctaccagatatccattctggagagaagcgccatctatgcggtggtggctgtttccatgaacctgctgaccggctttacgggcctgttctccctgggccaggcaggatttatggccatcggcgcctacgtggttgccatctttaccatcccggtgggatccagggccagcgtatactatgtaagcggcatatcaccggtcattgccaatatccagctgcccatccccgtggccctgctccttggcggactggcggcagcagccatggctgcccttatcggaatcccggtactgcgcttaaagagcgattatcttgccatcgcaacccttggcttttcggaaattatccgggcgttcattgcagcccccatgtttgacaccattaccaacggttcctacggtcttaagagtataccgggctttcccaatatctttgcggtattcggcctggccgccctgtgtattgccctgatggtgcttctcattaactcctcctacggcagggcatttaaatccatccgggaggacgaggtagctgcccagtccatgggaatcaacctctttcattacaaggagctttcctttgtgatttcctccttcttcacaggagtgggaggcggaatgctggccatgtttatgcgatccattgactccaaaaccttccaggtagcccttacatatgatatcctgctgattgtggtcttaggcggcatcggcagcgttacaggcagcgtggcaggcgcattcctggtcaccgcaggcagggagctgctgcgcttcttcgacgatccactgaccattgccggggtaagtgttcccctgttccgctccggattccgtatggtcattttctccatccttttgatggcggttgtgctcttctacagccgcggtatcatgggaaaccacgaattctcctgggacggactgttccggctcatacggggcattcccggcaagtttaagagaggcaggaaaaagccctcttccgccaagaagggaggcatccactgatgaacaacatggaaaacagcgtaaaaaatgtactgcatatggagagcatcaccatgcagttcggcggcgtcgtggcagtgaacggactgaccctggatgtaaatgaacacgaaatcgtggccctcatcgggcccaacggggcaggcaaaaccactgctttcaactgtgtcacaggtatttaccagcccacctttggttccgtatcctttaacggtgaggtcatactggccgatacgccccagggcaaaatgcggcgcctctatgagggcgatataacccccacggacctgactcccgtgcgcaagacaccggaccaggttaccaagctgggcattgccaggaccttccagaacatccgtctcttcggcgccctgactgtctttgaaaacgtcctgattgccaaacatatgcgggcaaagcagaatgtgttttcagccacactgcgcctcaaccatgctgaggaaaaacgcatgcgggaagagtccatggagcttctggaaatgcagggactggcccatttaaagaacgaaatcgcctcctccctgccctacggactccagcgccgtctggagattgccagagccctggccaccagtcccagcctgctccttctggatgaaccggcggccggcatgaatccacaggaaacccaggacctgactgattttatccacaaaatcagggacgattaccacctgaccatcttcatgatagagcaccacatggatttggtcatgcagatatcagaccgcatttacgtgctggatttcggcaagctcatagcccacggcacgcccgaccaggtccagaacaatccaaaagtaatagaagcatatctgggggtgagtgaagatgctgaagattaatgatttaagagtaaattacggcggtatcgaggctgtaaagggaatcagctttgaggtaccggagaaatccattgtcaccctcataggcgccaatggagcaggcaaaagcaccaccctgcgggccatcgcaggacttgtaaaagcctcggcaggctccatccagtttgacggtacagagctgttaggcatggatacccctgatattgtgtcaaagggcattacccttgtccctgagggcaggcgggtgttcccggacatgaccgttatcgagaacataaaaatcggagcctatttgagaaccgattccctggaccaggatatagaatgggtctacagcctgttccccaggttaaaggagcgcagctggcagttagccggcactctgtcaggaggggagcagcagatgctggccgtggccagggcccttatgagccatccaaagctgatgatgatggatgagccgtcccttggcctggcccctctcattgtccaggatatattcaacatcataaaggaaatcaacaaacagggcgtgaccattcttctgattgagcagaacgccaacatggccctgcgtattgctgaccagggttatgtgctggaaacaggccggatttccctgtcaggcaccggcagggagctgctggcagatgagtctgtgaaggcggcttatctggggaagaaaaagaaataagacgtgtaaaggccgggaagcgatgctccccggcctttgatctatagttctatcacttatatcacagagtttcactacaaactggtatacccataagcattcaccaacgcatccagcttccgtccctgcttacacagagggcagtccctgtagtcataatacgtataatccggcaaatccttccttccgaaaatagatgtaatcctgaatccgttgagctcctccaatgcgctgaaaatagcggtaatggctctcagattgccgccgtaataccggatggactcgattcccttgttcagtgccaggcctgtggtcacggacgcggtcaggatgatgacattcttatcccgaatcatgggaagtatgttctccttgaatatcatctggctgttgctgttgaactccggagtcacgatgtagatagtcttatgggcattcatggagagaacaccggcgctggtcagttcctcagccaggaaactgcccacgacctgggttccctcaagacacacaatggtatctaccaccgtgtcatagaggaacagccccgacaagctccttgctatctcctgggcctcgctgagcctggtctttaaggtggtcatatccagataataattgatatgggcatggttggtggcaaagtgtcccggtgtaaccttaagcggtgcattacagccggtggtatgtatcttaacatacttattatccataaaaacgcccccttttacaatggtacggacatcggtttctatatgtattattatactaaataatcctccccggtacaagggctatccggctgtcttaccattttctgctaaaaattacgaacatcctgcgatgttcccgtccttccctccatcctataaaacaggcgccggggctgcttccccgcagccccggcgcctgttgcttttatgattcaatgctacagatttctgtcatttccaggatgactccacactgtatcctcggttttcttctccggctcattgcctctgtctgaaacctccggtcctgactggtttcccggatttgactgtgtctgcggattggcctgttcctctggattcacctgctcctgcggattggcctgttcctctgggtttacctgctcctgcggattggcctgttctgcctgattctcccgctctccccggtcagcctgggtttccgggtttgcatgaagctcctgcgaagccgtgcctttgtcatcatcctcttttggttcctccggctcaggaatacccttaaccctgcggaatatcttcatgaattccttgccggtaattgtctccttgtcaatgaggaatgcggcaatctggtccatggcatccttgttatcgctcaggaggcgaatagcctcatcgtaggaatccttcagtatcttcatgacctcctggtcaatctcggctgccgttgcatcaccgcagtttaatacggcccggcctgtcaggtactggttctcctgggattcaagtcccataaggccgaatttatcagacataccgtactgggtaaccatggccctggccaggttggtggcctgctggatatcgttggccgctcccgtggtaactgtctcaaatacgatttcctcggcggcacggccggccatcagctctaccagcctggcctccagctccttcttcgtgttgaggtacttctcctcctcaggcacattcataacatatccgagagcgcccatggtcctcggcacaatggtaatcttctgcaccggctccgaatgcttctggagcgcgcttacaagagcgtggcccacctcatgataggatacaatgcggcgctcttccttgctcatgatacggtccttcttttctttacccacaagaaccacttccaccgcctcaaacaaatccttctgggacactgcgttgcgcccgtgtttaaccgcattgatggctgcctcgttcatcatgttggcaaggtcggcgcccactgcgcctgatgtggccagggctatctccttaaagtctacggattcgtccagaagcacatccttggaatgtaccttcagtatattgatacggccgttcaggtccggcttatccaccaccacgcggcggtcaaaacgtccgggacgaagaagggccggatccaggacctcaggacggttggtggcgcccagcaccagaagtcccttggtggaatcaaatccgtccatctcggaaagaagctggttcagggtctgttcacgctcgtcgttgccgcccatacggctgtcacggctgcgtccaatggcgtcaatctcatcaataaagataatacatggggcattctcagtggcgttcttaaacaaatcacggacacgggacgcgcccacgcccacgaacatttccacaaagtcagaaccggaaagggaataaaaaggcacatgggcttcgcctgccactgccttggcaagcagggtcttaccagttccgggagggcccactaggagggcgcccttgggcagcttggcaccaatctttgtgtatttgcccggattgtggaggaaatccacgatttctgtcagcgactccttggcctcgtcctcaccggccacatccttgaaggtgatgccggtttccttctggacgtacatcttggcattggacttgcccacacccatgattccgccgccgcccatgcgcttcatggtgaagttcataaggaacagcaggaacaggaatgggacagcgtaattcagcaggaccagaagaagggtactgctgtcgctcttctcacggttggtaaccacgttattatccagtatcctgttgacgaaatcataatccccttccagtctcaccacataataatccagattctgggaatacttagtattacccttcttagggatgaccgtgatttccgtgctgcccaccttgatggagtccacctcgccggcttccaccatctggacgaactcattataggacaactcctgacgtttcttggaattcagatagttgttcatactgctgaccacgataaatgtaagtatggcagcaaccaccagcatggttatggtctgccagttacttttcatattcgggtcctgtttgttattattatccatattgtacaaattctccctctgaatgggtcatctatcaatttccagcaaaaacccattctctaccattatagtgtcagtctccccataaatcaagaaaagaacaattaattatctaaaatttttacaaaaagtcctggatttattctcaatgaggatgtataatgtttcagttatttttttgatactatatcaaacaagtcacacactatccacaacaagaaaaggaggtatccccatcatgccagtcaaatacgtattcgtaaccggcggcgtagtctccggcctgggaaaaggcatcactgcggcatcgctcggccgcctgttaaaggccagaggctacaaagtgaccatgcagaagttcgacccctacatcaacatcgaccccggcaccatgaacccggtccagcacggagaagtcttcgtgacggatgacggcgccgagacagacctggacttaggccactatgagcgttttatcgacgaaagccttaccaggaattccaacgtcaccacgggcaaggtctactggacggtcctgcagaaggaacgccgcggagacttcggcggcggaaccgtacaggtaatcccccatattaccaacgaaatcaaaagccgtttccaccgcaactacacggaaaacgagacggaaatcgccatcatcgaggtcggcggcacggttggcgacatcgaaagccagccattcttagaggccatccgccagttccagcatgaggcaggcccaggcaacacctgcatcatccatgtcactctcataccttacctgaaagcctcagaggagcttaagaccaagccgactcaggccagtgtaaaagaccttcagggaatgggcattcagcccgatatcctagtctgccgcagcgaactccccctggacgacggcatcaagacgaaaatcgcccaattctgcaatgttcccaaacatcacgtactccagaacctggacgtggacgtgctctatgaagtaccccttgtaatggaggaagagcatctggcccagtccgcctgtgaatgcctggatctgccctgtccggagcctgagctggcagactggagggccatgatagaggcctggaagcatccaaagcaggatgtgaccgtggccctggtaggcaaatacatccagcttcacgacgcctacatttccgtggtggaagccctgaagcacgccggggtggccaaccgtgccgcggtccacatcaaatgggtggattccgagacagtcacgccggaaaatgcccccgaaatcttcaaagatgtgagcggtatcctggttcccggcggctttggcgaccgcggcattgacggaaagattcacgccatccagtatgcccgggaacaccgcataccattccttggactttgtctgggaatgcagctgtccattgtggagtttgccagaaatgcggccggatacgcggatgcccacagcgtggagctgaatcctgccaccacccatcctgtcatccatctgatgccggaacaaaacggagtggaggacatcggcggcactttaaggctgggttcctatccctgcgtcctggacaagacctccaaagcttatggcctgtacggcgaagccactatttatgagcgccacaggcaccggtacgaggtcaacaacgactaccgcgccgtgcttacaaaatgcggcatgatgctctccggcctgtcccccgacggacggattgtggaaatgatagagctccccggccatccctggttcattgccacccaggcccacccggagcttaaatccaggcccaaccggccccatccgctgtttaaaggtttcgtagaagccgctttaaaagaaaaaacaaaaaataacgtatgacaaaaatggctgccctgcttttgatctgccagtatgaatcatccgcctttgcgcaaactatggttaagattcaatcataagcgcatcacaaggaggtgaatcccaaatggatcacaaggaaaaagacgattttgacgttgacatacaagcctgctccaccatggactgtaccggcctgattccttccctgccccaggacgaggcagagaaggaggcctatgaggatctctatccatatgtcaccaaggctgtttcatcggacagggaataatggcagggcagcccaaatgaaaaaaacggagccgagacccctaagcctttgctccgttttattttatgcatcgttttatacatcgttttttgcatcgttctatgcatcatcttacacattatcttactttcctggttctgcggtccatatggactccctgctggctggccgcggccagccagcctccgtcacccatgcataaatctgcttaaaaactcctgggtctgaagctgtttcggcgcaccaaatatctgtgagggctcgccctcctccacaatcacgccgcctgccataaatgccacatggctggacacatccctggcaaaggccatttcatgtgtgacgataatcatggtaaggccctctccggccagcttgcgcatgacctccagcacctctcccaccatctgcgggtccagtgccgatgtgggctcatcgaacagcagcacctcaggctccatggccaatgccctggcaatggccaccctctgtttttgtccgccggaaagctgtctgggcttggcgttgatatagggagccattcccaccttttccaggtaatacatggcattcttgtgggcatctgtcttgttcttcttaagcaccttgacctgtccgatcatacagttctccaaaacagtcatgttgttaaacagattaaagctctggaacaccattcccaccttggagcggtactggggcgcattgaccttcttatcggcaatattggttccatggtacataatttcgcctgtggtaggcgtttccaaaagattcagacatctgagcagtgtggattttccggaacccgacgcgccgatgatgcaggtcacatccccgctgctgactgaaaagtcaatatccttaagcacaggattggtaccgaaggttttgctcaaatgacggatttctaatatcctgtctcctttcatcgcgcatcctccttcttcttatccttttcatccgggaaccggtacataccgctggtatgggccagggtgtcggtggtggccaggtcgtagctgtccgcgccgtccatcctgttttcccaccatcgaaggattctggagcaggtgaatgtcatgatgaaatatataatcatggtgatggtatatgcctcgaaattcatgtacagggctcccgcagcagcctttgtcttatacagcagctccgtaacgccgataacagagagcacgcagctgtccttgatattgataatcaggttattgccaatctgaggcatgatattcctcagagcctggggcagaatcacatagagcatggtctgtacatgggtcatgccgatggcctttgctccctctgtctggcccgggtcaatggaaaggattccgccgcggactgtctcagccatgtaagcgcctgtattgatggaaagaatgaaataggcggcgccccacatagacatattaattcctaacatgggcagaagcccgtaataaatgaacatggcctgggccatcatgggcgttccgcggaaaaactccacataggcgttcagaatcaatttcacagcccagagcacggcccttttaaccgggttgtccccccgctcacttggtatggtctggacaatacccacggcaaagcctatgatacagcccaccagggtacctaccagggcaatcttaaggcttacgcctgcgccctggagcatcgacataccgtatcggttgaatacgaccataacacggccgaaaaaatctgttggcatatcccttctccttactctttcacgtactttcgcctgacggcagcttagtttgccagaggctgaacagagatagcttcatccatcatcttggagaagtcatcctttgtcatctttgtgagaacgctgttaatggcatcctttaactctgtattccccttctttaaggaaataccgatattgatatcttcatccgtcacctggaaatcagcatcgccgccgccaaactcaatcatcttgaaattaggataagcgatgagagcgcccttgcctgtaggctggtctgtaacaaccaggtcgcacttgtcagcgtttaaggacatcagcatatcgggagcgctggcagtggccgccaggacattggcatcctgaatctgaggcagacaggtgttgtaccagatggtgctctgctgggaagtacaggtggctcctgcaagatccgccacgctcttggcatccgcgtacttgctgccttcctttacaagggtaacgatggttgcatagtaatatggctcagtgaaatccactgcctgaagacgctcagaagtaatggactgtcctgcgataacacagtcaacctgacctgtggtaacagccggaatcagggaatcccagtccagacgtacgatttccaggtcatagcccagttcctcgcaaatcttctttgccatcatgacatcatatccgtaagcaaattcattgctgtccgcaatggcaaccgcgccgttggaatcatcgggctgggtccagttgtaaggcgcatatgcacactccatggccacgcgcagcgtctttttctctccgctgtctgctgctgtggtgtctgcagcggcatcactctctgccttggcatcgccggctgcggttgttgcctctgcctttgtgtctgctgttgttgccgctgtgccgcctccgccgcatgctgtcaaagaaccggcagcaaggacgccggccagaaccaggcctaaaactttctttgcactcattttcataataatctctcctcttaaaaatattccaggctttactgtctaagaaaaaagccacacccatcctcacaggtatgactccactgtcatctgatgaccggcaatcccaaacagctaaaaccttgccctattaaacatggcgcactttactttcttaagcatatatgcgcctaacgtgctaagtataacataactcgttctgttttccaatacccaaatacgtttttttatgcaggaaaaaggtataaataattgtaaaaacagccataaatcctttaactgggaattcatggctgtcatatataatcatttcctgctattggctttcctttgccctgtccgctgtttcctgaacggtttccccagctgtctcctgtgccttgtcacccatcagatcatccatgcgctgtaagaatacatcatcaggctggatttggtttccgtcctcatccacctccacggcaaacaggaaggttctggcatcattgatttcgtagctgcatgtaaccagggtgtacagggtcctggccggatatgtaatctcgacgccgtagctgcacggcttcaccatctcatgcacaaaggcgtcaaaggattcctgggatttgaacctggtcttccgcacaataggctgggcctccccgtagtaggcggccactgcctttaacctgatttcccggtcaggggtgtagatgctgaaaaactggtgctccttaaaatacgcctcgtccttgtaccggttcacgtccttgaacatgcttccgttcttcatattatggccgtacagcacattattgcgtcccacaaaatctccctggctctcaaaatccaggtaaatggcccccgcaatattctccttgccgtaaaaatcatgattcaggtaaaaatcgttgtcctctccctgaacaatggggtaatcaatgttggtatccggcacccggatccatccgatggtatccggattctccttcatcagctcttcaaaattgatgggagatacatagggctctgtctccggttcctctgtcccgggctctgtcactgcttccgtggacggctgcgcagtagtctccctggccagctcggccagccgctcatattcctccctggtcctcttgtcctctatccagctgtggatgctcatggcaccgcttaccagcatcacggccagtaaaaccaggatgatgacgccccgtatcctgctctttccttttttctgatccataaatgattatgtgtcctttcctgctgtcatcccatatggccggaggccgctttgagctcttcgttccatccttcgctgtcagccactgcctcctgcatcagaagcagcatctccaggaagctgcggaaactaatctgtctgcgcttttccttccagcagatggtgccctgccaggtagcgttccttctgaacatgacccttataacaaaggtcatggggccaaagccccctgcattgaccaaaacgcttctgggactgataatggttccttcctccccgccatccgcaagcggtagaagaaaacgctccacttcatccctgagttcaaactcactggcaaattcccggcggtccgccacggccggatgagatacgtccccgcccaggacgaaatggctggaattgcgcacagacacctcgcacatccgcttgcccaggccgtgcataatatcacttccgtgtccgagagaacggtccagatactccatcagatccaaaaagctttcaaaagaataggtgccgccgtttctcaggtccattatatcaccctgccacgtggaatgaaacctgtatttcacatgaaggcagaactcggccagttttccctgaagccgcttctttcctgcctccactccacaccttaaggatgaactgccatgttttattcccacaaaggacctatggtccacactcttcatgggatagcggagctcatcgaacagtttttccagacaaatagccatctccgatatacagccaaaggggatttcctcctccagactgtcatggtagagccttccctgtaacaggcggccatcaaagctgtcaatggctatatttacatatttgtacgaatccggtagggtccctgtttttgcaatcgacatatattcacctgcatttctctaataaattgacatagtaatcccattaaacctgttaccattataacagcctccggttacaatccggttacaaaagaacacctggccgcttttttatgtattttttttctggacaattatggctctggttagtatacttatcttagaatgaccccgttttgcaaaggagagcagacatgaatgcatccgttatggaagataaacctactatttatataaaaaccctgggcggtttttccctcagggttggcgataaagagataaccgacaacagcaaccagtcaaaaaaaccctggtgccttctggaatatctggtggtattccaaaagaaatccatcagccccggtgaacttatcaacatcgtatgggctgacgaccccggcgtcaacccgggcggtgcccttaaaaccctgatgttccgcagccgcaagctgttagagcccctgggaattcctccccagaagctgttagtccagcagagaggttcctattgctggacccaggactatttatccgtcctggacatcgaccagttcgagtccatctgtaccagggtcctgaaccatgacatggatgaggacgaggcccttaacctttgccttgagggactggaactgtacaaaggtgatttccttcccaaatccgaatatgaatcctgggttatccccatcagtacatactaccattccctgtaccagaaactggtttataagacggtagagctgcttactaaaaaggaggatttttccagaataacatccatctgccagacagcagtagggatagagccttttgatgaagaattccactaccacctggtatactccctctacagggacggccacaccagtcaggcgattgaagaatacaaccataccctggacctgttttataacgaattctccatttctccgtcggaccattttaaggatttatacaaatccatccgcagcaaggagcagggtatcaatacaaacctggattccatccaggagacgcttaaggaggaagcctcaggaggggctttttactgtgaatatcctgtattccacgacctgttccagttggaacgcagggccatcgagcgtacaggggactccatctatctgtgtctgcttaccatcggtgacctggacggacatgccccgaagacaacggtcctcaacaaggccatggagcatctgaaccatgccatccgtgactccctgcgctgcagcgacgtgtacacccgttacagcatcagccagtacatcgtccttcttcccaccgtgaccatggaaaagggtgagatggtcatgaagcggatactgaacaacttccgcaggctctacagccgcaaggacctgattgtggactacaagcttcagccggtgctcccctgggaacgctctcctgcaggccttggtgaataaaaagagttttggaaaatagcaaatttgtggtattcatgaatcagaaaagctgcggcattatccttcattggattttctcccgcagcttctttattttgctttcccaatcattcagcagtgtctgtagctgtggccctgctccttccataaaaaagatggttcaggttcttcatcacatggcggtaagccggtatgagaaacagatccgcggcaatccaggccaccgggctggcgatgcacaccgctatatatccaaacacaggcaccaggcaaaagcccacaaaggagcgcgctgccatctcgcataccccggcaataatggccagcctggaatacccaagtccctgtatcatgaaccgcaccgcattgacaaagacaagcggaatatagaacaggctgttgccgatgaggaacagacgcgtgttcctcaggatttccccttcccccttatccacaaacatgagggcaatccactgcccgaagatacagagcactgcaaaggctatgacggcatagacgcagcccatgacagccccagctttcaggccttggtcaatacggtccagcttcctggcccccacattctgtccgccgaaggtggccatggtggatcccagggcgtcaaagggacagcagaagaacatgctgattttgctgcctgccgtcaccgcggccactgccatggagcccagggaattgactgcggtctgcaggattacacttcctatggcggtgatggaatactgcagccccatgggaattcccatgttgcacagaatcttcatataatgggcatccggcctccactcgtcatcattcatcttaagaatggcaaatttctttttcatgtacagcaggcacaggattcctgacacagcctgggccgtgatggtggcccaggcagctcctgacacgcccatcttaaggaccagaatcgtaaagaaatccagagccacatttaccacagatgagaacaccagaaaaataagaggggtggtgctgtcgcccagggaacgtatggtacaggacagaaggttatagagataggtggccgggatacccaggaagattacgaagatatagctgtaggccccatcaataatatcctccggcgtctgcatcagctccaggatattgcggcataacaggcacacggtcacagtcataaccgctgaaaacaggattgccagccacgcgctgttggccacaaaccgtctgagggccttctcgttcttttccccgaatttctgggccaccggaatggcaaaaccactgcacacccccaggcagaaaccgataatcataaagttgacggagccggtggatcccaccgctgccagggccttaacccccaggcacttgcccacgatgatggtatccgccatattgtacagctgctggaacagcagcccgcacagcatagggataaaaaaacccagtatcagttttaccggggagccttccgtcatatcctttgtcacatttgcggccatgtatgtattcctctctgtttccatgaatttcatcccaataatgtactctcttaacctgcaatttgcaagtagaaaatatcactggaatccgggaccgggacatacattttacacaatgggccgggaacagattcccggcccatcatgcctgttattggtagcagagtacaggcattcccttataaatcaagtcatagagcacgctggctttttccggcggaaggttgatgcagccatggcttccgctggtctggaagatggtgccgccgaatttgcttctccatgtggcgtcatggaaaccaatgcctccgttaaagggcatccagtaatccacatggctctcgtactcataggttccgtccgccttcttggctcccctcagtatcctgtccttttccttgtaggtcaggctgtagatgcctgggggcgtgtcgtaattcttggatatgtttcccgtgacgcagggtgcatcccacaccaggtttccttcctggaacatgtatacatgctgtcctgtcaggtccacctccgcatatgtggtgccccagtcaggagccgtgcggctggctgccgtcatggcgtatacgggttcccggtccacaggaccggctgcgggaccggcctgaatcagggctgccagggcctggacctcgcccgccacatctatcttccagccataggggcctgtcagctccacatctttgcctgtggctgtatggaatacgcgggcagttccggccgtatcccttctggacgccatctctgtcacaaaggccgtgattttctccagatcaaccgtcggcaccccgtcctggcttcctgttatccaggtggctatggtctcaccgccaagggtctccttctcactgccaaacacataattaacgctcatgtcccggtactggttcatgcggctgcacagagctataagattctcatctgtctcccatatattaacctggtaataacagcctgcgctgtccacatccactgagttctgccctgcttttacggcggcggtaatcacctccgttgttttggcctcgtccacattattgccctggacagccggtataatggaaaaaggctgtccctcctcataggaggatatgcgggcatcggaagtgacggtgatgccggagccgcttatcagggtcagagccttaatccttgcccccagggcctcctggctgtaggtcactgtcatggccatggtatgggagttatccgcatccggtcctgagacacgtccggctgcgttctgcgcatccagtatggccttaagtccctcgggaacctccaccttgtaaccgatgtccgtacctgctatggtttcctggcgtccgcctctctccctgatggtgagattgtattcaccggcataaaaaccctcgattctggccttggcctcatccacggtcagtccgcccactcccacgccgttgacttttgtaccggatacaaaacgggttgtatccccgctctcatccgccagggacacaaacgcccctgccagcacaagcacagccgctgccattaccgctgcggccagccttcccatccatgtcctcttccttaacttctgcataaacaatcctgccctgccttttattgatatttactgcatttttttcctctcctgcctgaaaacggcaggacgccttcttaacataacagcccttcaccatattttcaatatgaaaatcaaaaatgtaagaattcttcataaaaatataaaatccggggtcccaaaaacagggaaacccggattctttcgtataccagtacctttatcagtccactacctctatgctctcaatgacaggctggttgtcctttgccacggaaccgttgttgtcttccacctttgtatccttgcagatggcatccactacctccatgccctctgtgacatatccgaaacaggcgtaatccccgtccaggaatgtgctgtcctcatgtacaatgaagaactgggaactggcgctgtcctttatctgggaacgcgccatggaaatcgctcccctggtgtgggacagtgggttctccactccgttgttggaaaactcgcctttgatttcctggtcagaaccgcccatgcccgtgcccaggggatcgccgccctgaatcatgaaaccgcttatgatgcggtggaaggtaagtccgtcatagaaaccgtcctttgccagcttcaggaagttagccactgtgatgggggcctcgtccccgtaaagctccacggaaatggtgccgtagtcttttacgttaatctttacatggtgtttgcctgccgctgccgcaatttcctctgaggctgtatcctgggctttcttcgaagcctctgctgtcttggctgtctcctttttttccgtctccgccttggctgcatctgtcgtggccgcctcggtctgcgccgccgttgttgcggcccctgcgctggtgctgcacccggtcagggctgaaactgccagtactgctgccgcacatatacacatccattttttcatttattccgctcctcttcttatgggaaaaccagtccgccgtccttcggtccggccattttcccgtaatagacatccgggcgttatgtcacccggactgccagagcatattgtaacacctgtaatgccttcccgtaaaggactttatagaaatatcatacttttgtcacattttcccgtccgggcagtgcgcagcaggcagacatcacccggcggcacaccacgcacagaaccacggtgaccgccatgtcgggaagggtgcttcccacaggtgtatccacccgcatcagtatgcggtagattacaaaaccagccagccagatcagcaggttcggcagattggcctcctccgcctcatggtcctgcctgatgataaaataatccgcaatctgaatggcaatcataggggcaaacacagagccaatcagataaaggaaatccgtaatattatccatggggtataccatggctgctgcggtgccggcaagggtcactgccactgccgcccatttttccttaatccggtgtgtgatggacacgctggatacaccggcagaataagcgtccaggaatgtggtggtcacggtggacagcacaataatgagaagtcctgctgctcccagtcctgccttgaccatgataacagatatatcatattcgcccgtgtagatggctgctcccattccgatgacatacataaagcagctcaccaggccgtagaccagggcgctggcagccgttgccctgaagggtttctcggcctcccttgtataatcgcttattaagggcagccaggacagcggcatggccaccgacaattcaactgcggccccaaagctcagggaactgtctgtctccatggacggctccccgctgccggcaaatataacccggcacaggatgagagtcagcacaaacagcgctgccatggctgccgtattgatttttcccagattcctgattccaattaaaagccacaccagaatcagcccgccaatcaccaggcaccagacccacaggcctgcgttaaaaatgccgttggcagccagcccgccgtcataaatcatgatggaggtccagcccaccagctgcaggacattgagcccgcaaaacagcaggcttcctttctgcccaaagctcatcttcactgtttccatggagctgcgcctggtatatccgccgatgagtcctgccatgaacagcagggcgcagccaatcacatggcccagcacaatggctgccagcccctttccaaatcccagcggcgccagatatgtgcctgtcagtatctcagctatggatactcctgccccaaaccatataaggctgttggcagacacggaggtccctttttcctttatacttatcttttccttcatgctcattcccccttaatactcgccccggatggcaaatccatgattcattggtccgcttccctttcccaggtccagctgggcttccagcgcgcctgatagatataccttggcccgctccacggccaggtccatatccatgcccttggccaggttggaggcaatggcgctggacagggtacagcctgtcccatgggtattgggattgtcaatccgcctgcctttaaaccatttcagcttcttgtcccggtacagcagatcgttggcatcattgagctggtggccgcccttaagaagcacggcgcatccgtagccctccccgatggccctggctgccgtctccatgtcgccgggattatgtatctccattcctgacagcacctctgcctccgggatattgggagtcagcaggttagccatgggaagaaggacttccttcagcgcctctatggcctcactgctgatcagacgggaaccgctggtggataccataaccggatccaccacattggcagccctgtaaaatgccagcctgtccccgatggcctctatcaggccgccggaggaaaccatcccgatttttactgcatccgggaagatatccgtaaatatgtcgtctaactgttcctttaaaaaagatggagttacctccatgattcctgttacgccggttgtattctgggcagttagtgccgttatggcgctcatggcatataccccgtgagcggtcatggtcttgatgtctgcctggataccggcgcctccgctggaatcgcttccagcgattgttaatgctgttttcattgtcattctccttttcgcattaattttataaagcggcggaaggtggtgcccccaatccgccgccgggaagctccggcgcccatgcctgataccacacagaatcgttccgcatatcaaaaaagcggaacaccaaaacaggtgctccgccggcaatcgtccgttatggtccctacgttggcattatccaaatcaggtaatgggtctaagcatgaacagcttactctcagcccacttaagtgagctccccgtttatttacaactaccattatacatggtttcaggaagattgcaatgcttttatcttgtcctgagccggaaatgagccggaaagtacatcctatcccagggccctgtccacgattttcaccatggccgtaaaggtggtgtcattgtaatccacatcaaactcatcccccggctggttcagtatgcgctttatgctcagtatgcccagaccgccgtcccgtttgctggacagtatcctgcttccgttcttcttaatctgcccgttgtaggaattttccaccagcatcataaggtggtcgtccagccacctggcctggaccaggatgaaacgcggtcctgtcaggcggcggcatgcttccagggcgttttccagcaggttgccggtgacaatgcacaaggtcaaatcgtccaccggcacatgggcggataaatccaccctggcagtgaactccaccccatcctgccttgccctggcggcatactcctgcaaaagcccgtttacggcctggttctggcagaacaccatctcagccgtcatgtccagctccctcttcagattcatcaggtaattggtccgctctcccctgtccatgttcagaagggcatggatgtgatggcggaaatcatgcttgatgatgcgtacctgttcaatgtaatccagggtctggttataatgctccctctgctggctgataagctgcctggcaaactgcagctcctcctctgtcctgcggcggcacatgatttccagggtgctgctcagaataagcacatagagcaccagtatcatgatgcacagcgccagatagaacagcacgtcctccagtccccgctcagccagggaacgcgatgagaatatggtgttgttcccgataaaaaggatgaacagggagacagaagggtatgtcagcagcagggaacaggagcgcctggataactggtcaaaaagccggtttaccttatccctcagccaaaaccgcacaaacacataaaacccgcaggcccacagcagggataccgccacacagatttgtccgtatgtcagggacacatgcccctttaatatccaggcagcaaactcgttcagcgatgcggacaggaccgcgaacagccacgcggatatgtacaggaatcctttcttaagcagggttcctttaaaaaagacaaggagcaccagaaagtaaagacaggaaaatatgccccggaacacaaaaaagacctgggggctgatatggaatatggattccatggatatcatgatgacccacaggtaggcggaaatggctgctatgttctccctgtaactgtgttttggatccaggcatacaaaaatgggcatcatacgcacagccaggttaatcagattcataaagacagtacatgccgcgtcgttcataggtacctcatttcagacggtaatggtaataggcattcttgctcagtttataaaagttcctggatatgggaatcatctgtccgtcccgcatgtaaaaacaggaatcctccagcttgtccacatagtccagattcacaaggtaactctgatggcagcgcaggaactgggcatggggttccagaaccagctgcagctcagacagcttctggttgacggacagtacttccccatccgtcagcttcacaaaaacacggtgaagccggttctcaaaccaggccaggcgctccaggggaagctccacattcacccggttatggaccacggacaaaacagccttcttcactcccagcctgcgcctcaccacacgctccatggtggaccaaaagttctcttcctccacaggctttaaaataaatcccgctgcctccacgcggtatccctccacagctgattccagggacgatgtgataaataccaccaccggatgatccttgtcttccgccagggcctgtgcggtgtcaatgccgctcattccgggcatcagcacatccagaagatacaaatcatactccctgcccgactccagaagctcccttccggcggcatatgtatctatacgcacctcaatgccttcccgttcaaaaaaacggccggcatattctgctgcctgaaggcgttcctcttctgtatcgtcacagacagccacattatacatacccgggaccccctctctcataaaactgctgtacggcgcacagcctatcctatattttattggcatttatgccataagtcaagttcccctgcaaagtatcataatcggtatattttctgcagaaatggtccttattccacccaggctcctatggtagaataaaggtaagaaaaacattataacaggaggggttttatgggttcaaatgtaattgtaacaatcatcgtaatcgtctacctgcttttcatgctgtggattggctggtactcatccaccaagatatccaccaacaccgacttcatggtggccggacgccgtctgggaccgcttctcatggccggtaccctggcagccacggaaatcggcggcggcagctccctgggcgtggtacagaacggtatgtcaggcttcggactcagcgcgtcctggtacataaccaccatgggtatcgcctttatcatcctcagcttcgtggctcccaaattcagggcagccacggtcaagacggttcctgaatatttccgcaggcgttacggaaaatcctgcggaattataacagccgtcatcatgcttcttcccctggtggggcttaccgccggacagttcattgcttctgccgtcatcctgtccaccatgctgaatattgactaccaggtggctgttatcattgtagctgttgttgttacggtctactccatcatgggcggtctctggagcgttacactgacagactttgtccaggtattcctgattgtcatcggcatgattatcgcagttccctttgccatgaattacgcggggggctgggacaatgttgcatccaacataccagagggcacattgagcctgttccagggctatgatctgtttggaattatctcccttgtaatcatgtatacagccactttctccgtagggcaggaggctgtgtcgcgattctacgctgccagggacgaaaaggcagccaagggcggcgcctggctggcagccctggtaaactttatctacgcctttattcccaccatcctgggcatcatcacgctggccctaatcaatatgggcaaattcagctccgcgcagtttgagtcagtgggcgcgcgttacgccctgccggtccttgccatcaacaccatgccggcccttatatgcggacttctgttcgcaggcatcatctccgccaccatgtccagctctgactccgatctccttggcgcaggctccatctttgccaatgacatctataaggcagtgctgaagccggatgcatccagccagtccgtcatgaaggttacaaaaatcgtcatgtgtctggtgggcctggcctccatgttcatcgctctctttaacacacagagcattgtatccatcctgatgttctgcttcacattaagagcagccggttccttcttcccatatgtcatgggccattactggaaaaaggcgtccacggcaggcaccatcgcctccctgatcgccggcaccatcgtggtggtatatctggaacacatttcaaaggggatgcttttcggcatcaagttcagccagcccatcattccgggtctggcggctgccttcatctgctttattatcttctcactggccatgccgcctgagaaggagaccacggagctggctcctgaggaagatgattaattattaaccattacagggactgtctgccgccggtgtatggccggcgaaaacagtccctgtctgctattgatactcctggttcttaggatgctttatgatctgctcttcctccaatcctccaccacctgcgcggccattttcccggccgtgtccctgtttaaaggcatgacccggccatgatagggaaaatataccaggttggaccacagcacctcgtatcctcccttatcatactcttctgcggtgggcagatagctgctgcatccgttggtatagccgttgaaaaacagaagcggtgcctctgcctccttccaaatatcaatggcgatccggcacatggcctcattgggaacaccgcagagacagccctggttgacaaaaagatactgaatctctatgtcagcatactgcttttgtatgccttcatccagaaggcgcttcacctccttcagccacatcctcccgtcaatttcgcctttcctctccgcctcctctgcaatttcctctgccctttccatgtccggcacatcagccgcaaaccggcaaaaggaagatcggatttccacgcgctccaggggcatcagcaccaatgaggcatacacagcgtccacggaccggaacatatcttccgccatctgttccagggcccggcggctctggggcacatatttttgcctgtattcctgtgaaaatcctttccgggccatctcccagcagtgaatctccacatattccatgttgtcctgatgatatctgggacggatatccccggcagctccctgtaccatcatcaccgggcagccgtatgcttcctccagccgtttccttgcggcccccatataatctgcggagataaaataattatccccggacagtacatttgcatgggctgtcacgcgaataagaaggacctccggttcctttccgtcccgggccgccagctttaaaatgcctaaccgcccgtccatctgctccggttcattcctccggttcacccccacagtgttttccccaatcccccaggccgcctccatggatttcatttttcccgcggccttcaggacagccgtatctgcctgccggcataccatttcaaagtaatccggttcctccgctgcattgggcgcactgtgagtatgggaaaagcataccataatccgctcccttcccgtgtgaagcgcagcagccgccctgtcccgcaggacattggacagctccactgtaaagcccaggctgtctatgacaataaggccgcccatgacgccgtcagcctcccataccaatgcctggagccttaaagaatccctcacgcccctggaacggttatccggacggtaaaatcccaccatctcagacggattatccggcgtgatgtccgcctctccatatccggcctgcaccatattacatgtctgcatgataaaatacctcttttcttaatttctgttttcttatttctgtttccttatttccggtgactctatcctatctcccgggaaacggatatgcaatctactgttttcttctgtagaattctgtattatggtttccgcatcagcctgatatacgccactcaaacctgccgaaaaagggagccgcgcactgcggctccccatggtttacttctgatatacaatttttcgtatggcgtggacagaaagacagtacttatcccccagctcctccagggataccccctgccggtaagcatccacgattccggcgttccgctccgccagctccctgcggcagccgctttgctcaccccaggccctgtgccggtcttccctggccgggatatagatatatccggcctgtatgtattcctgcagttcctccaccaggtgataggggaggactgcctttgcattgacatatttcatgtcggctcactccttatcttcatcactcttaaggaagcaaagccagcattcatctcagcggcacatattactccatgcaggcgccgctgagcttacaggctttgcatggagccagacattgttgtttttctttttattcctgcacatgattctctccttccaaaccatcctcatcccttaaccaggcctgataacggtatctctgaatcactacggcccaactgttaccggaactcccagaggacagtattcccacagaatatccatcacatcatttgtaaccgcgatacagccggaggttcctcctccctggtccccgtgtatctcaatggccccgcctaaaggagtattccagggcggctgtatgcctgccttgtttgcctccacaatggcattatactgttcctcattaatcaggccgtctctcaggccccgctctgcatcctcggcattgggataggataatcccagagccagatagcatatgctctggtcatttcttgtgcacacatagaacgatccggagggcgtgatttcgtctccctcctgcaccttgtcccctgtctcggaccgccgtcccagctttacgggccaggttcctatggtctgggcatactgtttcagcgtcagcgtatttcccatcttgctgacatagatgttcaccccattgacagaaggctggtaagctgcccccggtcctgcattctgcccggccagggcgctcagaggaccggccgccgccaggcacagtgccagcactccggcagcagcacattttctgaatttcatcctgttccatctccttacgcttatttctatttggtttagtataccatataatcccaaattctaaaccaatgtaagaaaatcgaaaggaaaatatatctattcttctgttttctcctccccataccccagctggggcagcacattcatgggatggtccaatatcaccagattggcgtccttatccagatagtgctcctgcttatgtatgattaccatgctcctcccggcaaaatactgtatgtactggcagaacacctcggaagccagggtagtccccaacagcagcagggtatctgcctttgttatctcctccgtggtcttagtcatgttctggctgtccaccatctctccaatcagggaaatcatgggccgtatgggaacattgcagtccctgcagattggcacccgcttcgcacccgccatatatccgatgggatactttttcttacatctggggcactggttctggtaaatacttccgtgaaggtttatgacatgacggcagccgcccctgcgggccttgtcatagatgttgctgtctatgatgcattggagctttccggccctctccatggcagccagggccgggccggaagcagtgtcccctggcgcgttgtgaagcatctcctttttgtagaactcgaaaaactgctccggacgggtattataaaatgcactggtatacatttcctcaacaccgtagccataccggttctcaatgtcataggccttatcctgcttcttaataccgatgaaaccgccctcttccatcataccggaaccacagagagccacagtataggtactatcatccagaatctttcttaactgagctattttttcattcatagtgatacccccttccagtccaacccagcaaatgcctcccgggaggttacaactgttacttattatcactattatataattttttccagataatttccaccttttttggcagttttatcttactattttccttttaaaacgtcattttctttcttttccacctgagaataaaggagaacgcccccgattgtcaccacaccccccgctatctgcaggggcgcgggtacttccctgaacagaaaaagcgcaaagacagcagcagccacaggctcgcacagcttggaggcagatacaaaggaaggggaaaagaatttcaggcaccagctgaaaatactgtgccccaaaagagtggagcacacgctgagaagcaggcccacaaccacggacctcactccgtatcccgtaaaggccagtccgctaaaagcagttgccagccccagggccagggcgcagaacacatagacaatgtaggtataaatcgtggtggacatataacccctggcctgacgcccaatgagggtgtatacggcgcagaatacagccgcggcaagggccagcacatccccgtacaaatggtttcccccggcggagtagtcagaaaaggcaatcagaaggcttccgcccaccgtcacaaggatacttacgccggcaggcacagatatcttccccttcatgaacagacagtatcccagcgccacccatataacctccgtgcacacaatggcagtggaactggccactgaagtctggttcagcgactcgaaccatgccgtaaaatgcagggccaggaacactccgctggccccgcacagcaggactgtctttctgtccgtttccctcagttcccgcctgcagtccttccgtcccaaaaccacaggcgtcatcagcgccacggtccacatcaggcggtaaagggctgtgaccacagacggagcctgggaatatttaacaaaaatagccgataatgatataccggctattcctatgattatcatgaccaatggatgtttttccatcaatttcatcttatgtatcctcgcttatgtgattggtagccaaactgctgtagaaattctatcacaccaatgctcctgcgtccagatactttcttgaataactcccgctgattgcccggctgccgcctatggaatcagcctgctggttcccagccggtctgcgcccagctctatgaaacgctgtgcatcttcaatggatgcgattccgccggctgccttgaccttgacctcggggcctgagtacttcctcataagggccacgtcctccggcgttgcgccggctgtggaaaatccggtggaagtcttgatgaaatccgcccctgactccgtgaccacacggcacatttccttcttctcttcctctgtcagaaggcaggtctcgataatgaccttcaggcatctgccgccgcaggcagccttaatctgtctgatttcatccaggacctggtcgtaatgtcccgcctttacaaggccgatgttgatgaccatatcaatttcgtccgcaccgttcttcaccgcgtcctctgtctcgaacaccttcaccgcggtggtcatgttgccgttgggaaatccgattacggtgcagacagccagcttatcccccacaaaatcctttgcctgcttcacataacagggaggaatgcacacagaggcggcggcgtattccaagccttccctgcacagcttttctatctgctcccaggtagctgtctgctttaacagcgtgtggtctaccctgcttaaaatgtccttcttatccattattttctatcctttctatccgtcagtcagctgcccccgggggaaaatccaagaggcattcttccaaattacaattcgttcagaaccgaagtccctatggtgccttccggcatcttcaccccaaagttgtcagcaaccgtggctccgatgactgcaaatgtatctgcgctgcccaggtcctttccgccctccatggagggagaataggcgatgaacggcacctgttccctggtgtggtccgtgcctgtataggtggggtcgtttccatggtccgcggtgagaatcagaagatcgtcctcccccagaagcggaagcagctctcccagcttttcatcaaagcgctccagctccctgccgtacccttccggattgcggcggtgtccccacagggcgtcaaaatccaccaggttcacaaaacaaagcccgttgaaatccgttttagcatactggatggtctgctccatgccgtggacagacgagttggaatggttggactgagtcagaccctcgccgtcaaaaatatcgtatatcttaccaatggacaccacatcatatcccgcgtccttaagggcgttgagggcagtccttccatatggcttcagcgcataatcatggcggttggaggtgcgcctgaactcgcccttcttcatgccggtatagggcctggcaatgacgcgtcccaccttccattcatcccgcagggtcagttccctggcaatctcgcagtagtgatacaggttgtcaagtcccatggtctcctcgttgccgcatatctgaagcacggaatcagcggaagtatatacgatcagatggccttcccgaatctcctcctccgccagttcatccaggatttccgttccgctggcgctcttgttgccgatgattttacgtccggtccgcttctccagctcgtctatcagttccttcggaaaaccgtggctggtaaatgtctggaagggcgtggtcacaagaagccccatcatctcccagtgtcccgtcatggtgtccttgccacggcttctctccttcagacgcatgtaacgtcccaaggggtgttctgccggctccataccctctaaggggtgcaggttgaccatgcccagctttttcagattcggaatcttaagccccggaacctcccgggcaatatgtcccagggtgtccacccccacgtctccatattccggtgaatcctccactgccccgattccaagtgaatccaggaccacaacaaagatacgtttatattttcccatcttacgacctccttaaaataatgtgaccaggcccaccaccatggcgctgatcaggcttaccgccacaccgcctaacatggccttgaacaccaggcgggcaagggtgcttttcttttcagggcacaggaccgcgatgcctgaaacgcagattccaaggctggagaaattggcaaacccgcacagggaaatggcgcatatcatccctgtcctgtaatccatggaagatatcatggagcccagctgctggaacgccacgaattcattgaggaccagcttgcttcccaggagatttccttccagaaatatttccgaagggtccaggcccataaagaagccgaagggggcaaatacataggaaaatacctgctgaaggctgatgccgcagacgcctaacagcttattcaccgctgccaccagcgccaccatggccaccagggacgcgccgatggacagcgccatctgcataccggtgacagccccctctgcaactgcctctatcacgttggtattattccccttattgtccatcttaacgcttcccacttcccggacctcctctgtctggggcagaagcatcttggccaccataatgctgcccaccggcaccagtgtgctggcaatcagaagatactccatgggaatgcccagggccgtataaccgcccagtatggacacggacatactgcccatgccggaaaccaggaccaccataacctcgctgtccgtcatctggcccaggtacttgctcaccagaatggggctgtcggtctgtcccaggaacatgttggcaaccgccacaaagctttccacctcggaggtgcccataagcttacccactgctttaccaatccattttaccacaaatcccagaattccgatatagtaaagaagacttaccagggcagacaggaatacaatgttgcccaggacctgtatggcaaaaacggatccggtggcagccgtgctgtctgccagtgaaccaaacacaaagcttaaaccatcctgaccgcagttgatgacgctggtcactgcatccgataccctggacaccacgtaacggccggccggaacctttaccagaatcaccgcaatcaggaactgggcaatcactgccttgaccagcattttgacggatatgtttttcttcttccaggaaatcagatacatgatggccagtaccaaaaggatacctgtaaggtttaataatatcttcatttgtccccaccccttacctttctccttaagcctgcttatctgcctgaatcagtctgcggacggcttccaccgccaccttgatggctgcctccgtatcgtggacaataggattatccagtccggcctcctgtcgctcctggttacccaccaccaggaaatcagaaccgcagcgcacccttaagtggctggctgcaatgaacagggcagcggattccatctcagacgccttgcagcccatgcgcttccatgcctcccacttatttaacagctcatagcttaccggcatgcgtttgggctcatgctgcccgtaaaacgcatccttgcactgcaccactcccgcgtgatacgtatatcccagcgcctttgccgaggaaaccagggcattggtcacatccaggtcagccacggccggaaactcgatgggtgcgtattccctgctggtgccctccattcggatggcgcctgtggcgaccacgatatccccgcccttcacgtccatgtccataccgccgcaggttcccacgcggataaatgtatcagccccgcacagcaccaattcctccatggcaatggatgcagacggtccgccgatgcccgtggaggtcacgcttaccttttccccgtccagataaccggtgtatgtaacatactccctgctgtccgccaccagtaccgcgttgtcaaaatgctttgcaatcttttcacagcgcttcgggtctccgggcatgatgacataccgtcccacgtctcccttcctgatctgtaaatgatactgtaatccttcttctcctgaatagttctgcataataattaccctctcttttaattgattttttgtttgcgcctttacctgaatctgcttgcattcctgccggcatctgcgcttttgtttttgtttgtttgtttatttgtttgtttatttgtctgtttattgcttacttgtataatatcatttaacttgtataatttctagatggaatattttacaattatcatagtcaatttttgtgtatattgacaataaatatgcggtttttcatggtgttttactggttttagtctgttatacaactagacatgtctattttattgacaaatcagcctttgggaattatgatgttgaataaggacttgtatatttttgtgatacagccagatttgtgatacagccagaattgtgacacagccacacaggaagggtgaacctatggacgcagatgtattatctgagaaagcaaagaaattaaaacatgtaaaagtatataaccgcctgtattccatgatacaggacggcgtgtatcctccgggcagccagcttccctccgaaccggagctggccctgcagatggatgtaagccgcatgaccctgcgcagggctctggctctgctgcaggaggacaatctggtcatcaacatacgcggtaagggaaacttcatcagcgaacgcaatcccggcgccagtatgccgggcctggaggtcacacagcacccggtccgctgtactctgtccggatccattgacgagacagagatggaatttcgcatagaacctcccacagaatccatcagtcagaacctgaagcggaaaactgccgtggtggtgatcgcagaccgctggtataaaagcgccggaaaggcatgcgcctacagcctcagcttcattcccatcgaggttatatccgggaaacagatagatttaagggagaaagaagatttattccaatacctggagcatggtgtatatgaggatgccgtcagcagcacctgccagctctcctacaccaccacgggcaatttcacagccgtcaagtacatgctctcccagcacgcctcctttattctggtccaggagacactatatgatgaaaacagccgggtactggtatccagcaagcactatataccggtggaatccttcaaaacccaggtcaatgctgtggccggacgcgcctgaagggccatttttattcatccagattatgcttgactgcaaatacagccagctgggtccggtcctttagcttaagcttttccagcagacgggagatgttgttgcgcaccgtcccctctgccaggaatagcgcccccgcaatctccctgttgtccattccccgggcaaccagccgcatgatatcccgttccctgggcgtcaaatccccggccatgtctgcctttgttttgccgggcgccatctgacggcgcatcccctcaaatacgcttcctccaaaaacccgtatcccggcgcatacagccttgacggactggatgaccttgtcatcctccatctcctttaagatatacccgtcagcaccgcttcccacggctgcatccacggtttccctgtcatcaaaggtagtgagcaccagcacctttatatccggatagtcctccttgattctggtaatcccatagctgccatcgtattccggcatgcgcatatccataagcaccacgtccggtctgtgcttcctgcacagctgccacgcttcccggccgtcagcggccagccccaccacctgtatgtctttgtcctgctccagtatggccctgagcccctgtctcaatatctggatatcatcggcaatcactgcttttatcatatggttctgctcctttttcctctatcccttatctgccggcacacggcacacggcgccctcagtttccgtacggcaggcatatatatatctgaaatccttccccggattcggatatgaaccggactgttccccctgcctgttctgttctctggcgtataccgcggattccgtttccctcctctatatggaggcatccctttccgttatcaaacatatacaggctcaggctgtctgcgccgaatttaagtatcacatccatgtgggttgcatgggcatacttatggcagttggtaatggcctccctgagacagtcataaaccaccggagacaaatgggagtattcctgcctgtcctctccctgtatctccacctccacctcaaattccttcacactgccggttagctggtatactccctgggagataagtccataggaggcggactgcctgagattattgatggaacaccgcagctcccggatcccgctgccggccagttcctgggcctggatcaggtactcctctatgcgcttgtcctgttcctgtcctctctcctccttatatccaatccgtatgagcctgagcagcgaatttatcatggtcagcgtatgtccggcggtgtcatgcacctcctgggcaatgcggttgcgctctttttcaatggcaagactctgattggtcacagccagttccctgccctgctccaaaagctggtaatatcttcccacatctgtgagcataacggttcccgcaaccatatcccccttcttatccctgtggatatactgcctgacctccagccttctcctttcaccattgtcttccagcgtaaatacaggtgactgagaatccgcacaatctgcttttgcgcccttttcccccaggattcgcctgagcggttccatatcatctccggtttgcagccccagccaatgtacggcagccccgttgcagtaggtaatcttatcacgcctgttatacaccaccacgccctctgcaatggaatcaaatattttatcaaaggccatggtattgacatccaggaaatcataccggaacacagccagcagcatgagaacgctggtcagggaaaaagcaggaggcgtcaggtcaaagcctgttctcacaagccccgtcatatagagcaggttaaaagccagaggcactgctgcagccagcaatatgacggcaatatgcgccagcgccacacggttctttttaaaagccgccagcaccacagccatgccggccaggacgcagatataggtatagaccatatgaatgtaaaatacaggcccgtacaccacctgagccacctcgaaactggcatagaataaatggtggtattcatttgtcaggagaaccgaatagttaacagccgaaataccgaataaaaacagttccgccccatgccccagttttctccggctgtagagaaacgcaaactccagccatgccgttccgatgaagctgattcctatgtaggaaataccatatgccagatacttcatcccctttgtcatgggcaaagccgaaaacagctgtggcatacaccaaataatgataaggagctgacaggctgccaaagctcctgtggtcctggttttatctgccttcatcagcagccagcctgatgtgtaaagagacaggccaatggcggatagataggcaatcctaagcatgatatcaagcatatcccaaacctcctccgggcagttttcccgttactttcacctataaggcaaaacagggcgcaggcatggcctgtacccttgattatagccgctctgccgctgtgtgtcaaaagaattgcagacggtcacttcccctaccgctgcttaccctaccgccgcttaccctaccgccgcttcctctaccgccgcttcctctatcaccgcttcctctatcaccgcttcccgtcaacgcttcttcatttcgttcaccgctgcaaagacaatgagtcccagtccggctgccagcagatagacccaccatgacaagctgagccagaaaccttttgtcatgtaaagcgccaccagtatcatgatgatgccggaaatccgaatccatctcatacattttctcatatgcgccaggaggaacacagccagattgacagcctccagtatcagcgcatcccatacggatcctgtagataaggcatccgatgccatggcccccaggcacaggcagtagagaaccgtctgcaaatttgttatctcttttctgtccccccatatgcggcccagactccagataaaaccaacagccggaatcagctgtatctccaggcttagcatctccggccaccggataaacggctggcgccagaatgccgctgctgccagagctgctgccagcgtaaacgccgcccttttccagtgttccagcactgcaaactgaagtacatacagagctgtcaaaagaatatacgcgcactgccatccgcggcctgcctcccatgccatgggtatcaggacaaagatgaccagaatgtggaaccagtccacgtcccatcctccgctctccccttcacggcgtaccataacaggtctgaaccgccggaacagaatccccgaaaggatgagcagcgccgccgtggcgccatatacctggttttcgttcaaaccataccttgccgttgctatcatgggaagggggagtacagcggctgcggctgccagatgcagccagctgcagccgctccggtaaagcatcacatagatgacttcaaataccgccatacagagaatcatattccagagcgccagagatggatcgctgtaaaatgcccccatcatcatcaggaatactgtcatacctgtacaattccagaacctatccctgattttgctgcggtcatgcaggataaccgatgcatattccagactgtataccgccgctgtccacaccatccggagcacgccgtttgcggtcgcaccttctgccagaagatacacgcctgccagggaatacagacaactgcccttgatgaaccgttcccgcgccgtcccctccctgccaaaagatttcaccagcaggtaaacagacagaagaaggaaaaaagaaagagtctcctgattctccagccgggcaaccgcctgcgcagccgtgccaatagtcagtatgggaatacagaatctgtctttcttcaccatatcccatatggacacaatcagcacatacccccatacaaccacatcgtatcccacatccatgcccaatgttctattaaaaacctcccatccggtcagggtaagggcaaagagcactgccgcaacgctgccgcgaagtaccgggtaccgtctgccccactccgccatgaccgccgccagaagaatcaccactgcggatgctgccagctgatttcccagactgtccctggaaaacagcatatccagcagcagtaccgccatgtcaattgccagaacagcggaaaaaacacatccgcccgccagattattaagaggatttttaaaccttctctcagccagaaaccataccgcggtcatggctgcccccaaaaatacctgatatgtaaaatccacggggatacagaagcctgcatactgaaagaaaatcatcatggtcagactgtgaagcatcttcatttccgggctcctgcgccgcagcgccacaagggcggtcccggctgccatcagcccaaatgccagggtatcccagaatgtaacttcccaaattcccagaaacagtattcctattatgaatccaatcccgcctgccacagctttataagccatcattccgcttattatccagaactggagcgctgcaaaaaggccgaattcacccataaattcgtctataaaccgatctgccggggcgttcatgctgccttgcaaacctgattttctcctgtaaacctcatttcccccaatcaaaagaaaggagtaatacatcataccattcatgcaatccggccattcaagctttaacgctcccatcaaaaagcacatgctgaccgtcattccccacaggcaggcctgggtatagaccttgttacgaaatctcctgattttggaaaaaagagctatctccgtggctatactgcctgccagcaggacacggtaacggttttctccctttaaaataaactccggacccagcagcccgaaatatccagccgccaatatggtaagaaataaaaacacgctgcccagaatataaaaggcctgtcccgtccgctcaatcttaaaatatttttcagctgcccagcttgccccgaaaaacaaaccggatccccccaggaccataatcaccttgcagacactgggcagcacatgccatgccgtggtggcgaaaatcaatccggccagtaccacaaatatcactccgatcaccagtgctgccgtcccctggaagaaccccccatctattttcggcgccctgaccagagctgtctgcttgtgaggtatttctggcacccgataggcagactcagctttctcaaagtcctctggtactacaattgcttgcccaggcccataccatgccgctgacttttcatgctgtgtcactgcatccgccgtcctctcatgctgtatctctgtatccgccggtccttcatgctgtatctttatatccgccggcttctcacgctgtatctctatatccgccagtctctcatactgtatccctgtatccgccggcctctcacgctgtatccctatatccgccggcccttcatgctgtatctctatatccgccggccctttatcctgcattcccgtatccgtcttgccagttccccttgtcagttcccatatccttctcttataccggctgttggcaacagccaaaactattatggcagccagttcagcaaaaggagccaccagccatattaacaaaatgataaaccactccatacccattcccctttctatccgtctttccgataccgtctatacatattttcttttcatgttttcattataaaatataatccagtccggttatagatgctgtccgtcattacagcagtgacatttgtcactgatatttgattctgtatagggttctcccataaacaaaaacagcagccaccggcaatcgtcctttttaaagacgccaactgccaatgactgccatatataaatttttcagttaaccattctcaccaagaatacgctccagctgccggaccatttcctcatatggaaccgtacatccatggccgcctatggagatagacggctttgtctttccgtgataatcacttccgcaggtaatcatcctgaatctgccgcgcgcagccttatgataaaacccagcctgttcctccgagtggtagctgctgaatgcctctattccatccactcctgcctccagtatgggatccagcaattccccgcagtcttttaaattaacccccggatgtgccagcaccgcatatcccccgttcctgtgtatgatatcaaccgcctgctccagttttggatatttcattttaacataacagcattttccctgagaataaaaatcccagtaaaaattcacataagggttatcgcctcttgccccgccttccctgtaaggaagaagcaggggatggtccttgtattcctcccggccaaggagcacctctgcaaacatttccccggtccaccggtccttccagtagtaatctccggccagttcctccatatcctcctctgttacgtcaaatcccattttcctggttgcgcaaagcatctgcctggatgccgtcgctgcctgactgcttatattgtcttcgatgtcggcaaaatcatcactggtatcgtcaaatccataccccagtacatgaagattcacacctctgaacgtgcagtctatctctatgccggaaacgtacctgattccggccctcctggccgcctgtctgcccccgtcgtttgcccgcacactgttgtggtccgcaatggacatgacgcggatgccgctcatggcacactgtctcaccagctcctcaggactgaattcgccgtcatcactgtaatagctgtgcatgtgtaagtccattaacttttccattctgaaccctccccatcctttctgtcatcccaatcatcaatacaacaaatatgaccagacacacgggatacagcgttacgctgatacgctctgccgccaccccaaacagcggaggcataaatgtggatcccacataagcgcaggccatctgcatgcccatcatggactgggaatactgcaccccaaagttatccggcgtttcatgaagcaggctgggatagatgggagcacagcccagtcccaccatgataagtcctgttagtaccgctccgtcaccggccggaaggagcagtatcacagttccggcaaaggcagtcagctgcccgcagcgcaccatgttcctgtctcccagccggtccgtgacaaaaccgctggccagtctgcccagggtaatccccagataaaaaaacgaagcccacttggccgctgtctggggagcaatccccttatgcagcaccatataactgctggcccacagaccggctgtagcctcaagggcgcagtaacagaaaaatgcagtcagcaccgcctttgcccccggaagccgcagcccctctctcagggtaatctgcctgtggggggtatcctgtccgctgtttccatctttctttaccttccacagaggaagcgacagcacaagacaggccaccagcgcaatctgaatcacacccaccaccatataaccggaattccacttaaagccgcgtgtcagacacaggcccatgatatagggtcctgccgttgcgccgataccccagaagcagtgaagccagctcatgtggcgggatttatagtggagcgccacaaagttattcagtcctgcatccacgctgcctgctcccaggccatagggaacggcccaaacacacagctgcaggaaggaatgggaagaggaaaagccaaacagggctgctgccgtcattgcaacacttacaaccgttacctttcctgtcccaaaattcctgataagcctgtcactgaaaaggctggaaattatggtgccgccggcaataatcatgctgataatgcctgcataggacaccgaagctcccagctcccggtacatggacggccatgctgaacccagaagcgcgtccggaagtcctagactgataaacgccagataaataatcacaagtaataattgaaacatctcatcctcctgttactgagcactcggaacccccgatacggcctcctgcgcgcaaagcatataaaacatataataaatacacaccaaaagaatatcgtcttttccttcttgattcaacccaaatcccgacttataatataagaaaaacgaccaatcggaggactgacatggcattacaggactgtaccctgaatttaaaccgcacaggaagggaactgcagccccatgggacgccggactttccctgtgcaggatattcttctgtatatacagacagtgccggggatgtggttccctggcactggcatgaggatttggaaattatttatgttgagtccggacatctgagactgcaggttccgggtaagacccttcatctaaaacagggggaaggcgctgtcgtcaattccaatatactgcattttgccgcggctgagcccctttgcgaactccactctctggtctttcaccctcttttggtaaccggagaaaaggattccgtgttttccaggaggtacgtggcaccgcttcttcagtgcagaagttttgacatctgtccatttgactatcttgccggagacttaagagccggaaatcctgcggccgtgttcaccgctgcctttgatgcattttgcggcgaaccattgggatacgagtttgtggtccgtgaaaaactgtcttgtatatgctgctgcctgtatatgtactattcccatgccatggattccagtaagccaatgccggatacggataatatacgtatccaaaaaatgataagttttatccatgaacattttcaagaaaacctggacctggcccagattgccagggctgcggatatcggagagcgtgagtgcctgcggtgtttcaaacgcgccatccagacctctcccctgcagtatctgctgaaatacagagtaacccagggggcttccatgctccttcgcagcccccacagcagcatatcctccatagcaggcatgtgcggattcaacagtcccagtaatttttcccagatgtttgtgcgcttcttcaagtgtacgcccagggaatacaggaaagccagctgcccgccttctattttcccataaagcctccgtcaaccggaatcaccgcgccggaaatataggatgatgcatcggatgccagaaagaccgccaatccctgcagatcctccatcctgccccagcgccccgcgggaatccggctggtgatttcttcatattgctttggatttacttcctttatattggcagttagttcagtggccatataccccggtgcaattgcgttaacattcacgccctgaccggcccattcattggacagtgcctttgttatttgtgccaccccgcctttactggcactgtatgccggaatcaacacactggcaaaaaatgcggtcatggaagctatattgattatcttaccatatttttgcgccagcattgttttgccggccagctgcgacatataaaataccgcattcatattaagagcaataattttctcccagcggtcatgcggaaaatcaacagccggagccctaaactgtatgccagctccattcagcaatatgtccaccctgcctcccagcttctccaaacattcattatatatattctccagctcttctgttttggtcaggtcgccccttaccgcatgtaccatgggacctttttttgccatctccccggcggaatcttcaaccatatccaaaatatccagcagaaccacctcggcccctgcatcatggagcgcctgtgccattccattacacagcccctttgcaccgccggtcacaattgccttcttacccgccaagctaaatttatctataaaattactcatattaaatatccttttctgtttttgtttccacagcatatcttaactgcgatacaatccgtaacctaattctttgcttatctggctaccatattttttcatgcataatgtatatttcttaatggttgcctcagtaatctgctccttgggagcagaaataccgatgcagcagctgacattgccgctgtaattgaaaaccggtactgccaggcatctcacccccaacgtgcgttcctcgtcatccagggcatagccctgctccctaatcttctttaactctttttctaaattctgataggttgtaatcgtattggatgtataatgttcaaaatcatagtagcggaagatgtcttcaataaatgacggaggtttgtaagccagaacacattttcccacagcggaacaatgccacgcttcaatcattccgatctgggccgaaagattgtattccctctggctccgtacctgatctacaatatacattttgcgatttcccattgccgccagatggacactttctttggtatcatcacaaattttgtataggtagggccgcgctacaatagccacattgaaattttttttaactccttcgctaaggtacagattccgaaatcctagccggtatttcttactgaccgggtcaatacttaccatatcatagtgcatcagcgttgccatcaggcgggaaaccgtacttttgtccaccccaagaacggatgccacctccacaattgtcgcacttcctctttcttgaatgattgataaaatctcaattcctctcgccaatgactgtaccatataatacctctcttacctgttttcccccagtaattcaaggactgcctttgccttttcaccgccatccgccaagaccttcataaaatctttacttcccgcaattgcttttaatatttccggatccgatgcttttagaatatctgtaaaatctttgtgggaaagctttgagatactggctagtgtctggcggctcattgcctgactcttcgctctttccttagggtaacctgccccggccgggtctgcaaacaatttttcaaaaatatactccagatttatgctgcccgcccagccatatcctttattaagcggcagggacacgcagttgcctccgtttatttgtgaaaagagccaggcgtctaacggttccacgatcaaaccgcacaccacccccgggaattgcagtacaccatttaaaaaaccctgtccggtgccgcatcccccaataacgaagtcgcagctgccggtatttaaaagaacagccgccatataactggtgtgaatatacgttaaagacggggtttgttccggattcttcatccccacattcagtacctctgcattggtggtcttatgtaatgcgttgacaatatcttcatttctgattgaagcacttacttcattgataaccgcgattttcatgttccctttcctcctttcgccataaccagattgccttctgcttcttagtacaatcctgttaacagtccaacgccgtacataacgacagccacgattacacaggacacaatcgacatcaggactcctgcctttgcaaaatctttgattgaaaaataccccgctgaatatgcaattacgtttgtcggagtagatgtaattaaaataaacgccagtgaagatgccaatgccgccggaaatgctatggccaacgtggatatcccaagattaatagacagctctataataataggaataacaatacttgcagataccgtggcgctggaaagcgtaatattcatcagcgatacacttaataccaccacaaaaatcatcagaatggggcttaatccgcccagatttcctaacagccccagcgcgatccagtttgcaactcctgtctggtagagcaccattcccagggatacgccggaaagtactaaaatgatactgctccaggacatttccttttctatttctttatatttcgttttgctgacacccgggaagaaaaacagcattgtggttaaaataaccggcaaagcaattggaatatcaacgcccaacagatctgaaagctgtgaggaaaacacccatagcgcaaccgttgcaacaaaaagaattaaagtaaccttttcatcccgggatagcctgggctgatttttgaattcattcctaatctcctgatttgtccttttaagatacttcatttcaggcttgaatgccaataagagcagcccccatgcaatgggaatatgaatcagtgaaatcggaaccccgtatatcatccagtccagaaatgaaacatcaattccggccatatccttcataaagccaatggccaatggatttgggccgtttcctgcaggagttccaaatccgccgattaagctgccccaggccacagaaatgagcagtgccttaccgaagttgctttccagcggctttaacccctcctcatccagaagagacttggccagcggcataagcatggcagcaacagccatgttggaaatccacattgacaacagcacgcccaccaccaggaagcctaatataacatatttagtgctgtttccggtgattgaaaggcatacattaacaagcctttttccaagccctgatttattgatgaacgcacttaagataaatacgccgataaagaatataacattaatgttgccaaaaccggttttaacaatgcctccaaaggaatcgacaccgaacagggccaacagcgccattgccagcagacctgtaaagtggaacggaatcgcttctgttatccagagcagaagggcaaaaatcaaaacagccagtgcattctgtccttccggtgtcagcgttgcatcttttatcgtagcaattgatgccggaaagctgacattcttaataaataccaacacaataaggctaatacatatataaatccatctttttgcatttactgataaaccacccgatgtacccgatacattatttatattactcataatcaattttctccattttatctgataatctgactgcgcggtgagaaacgaagatgattattcagacatttcatttaagatcttttccggtgtagccggaagtgaagtgacccgtacccccacggcatcataaatggcattcacaattgccggtattgtgggcagaggagccggctctccaattccctttgcgccaaggggactaaaaggatccctgttttcaaccagactggtgcaaaacatcggcacatccacgctggtaggaagaatatattttgcaaagttcctgtttacaggcacaccttcagataatacaaaattttccataatagcctgtcctatgctctgaacagcgccgccttcgatctgcccttcaatcccctgaggattgattgctcttccaacatcatgggaagcccagatgccaagaacatgaacctctcctgtaaacgtatcaacggcaacctccgcaatctggcttccaaacacatacgcctgccagggattgccttctccgctcaccggatccaaggcttcatgatgagctgtatacgtgcctgaacccaaaggaacatagcccctaacctttttacaaatatcaacggcctctttaagagaaagatcataacgggagtggccctgcacaaaaattcttctgttcctcatacagattgaggaagaatcaacattccagtaggctgcaatttcccttataaatttctcttttacatccctgcatgcatttaataccgcattgccaatcatatacgactgtctgctggcaccggcatgggcggcttcaggagatcttgctgtatcgttatccccgatggtaatatcttccggatacattccaagttcatccgccgcaatctgtgttaaaacggtcagaataccttcgccaatctcagtaacaccggttaatatcatagcagtgccgccgtcgtcaatttcgacaaatgctccggccttatcaaccgttgcgcagcgtcctattccgtaccacccggttccgacaccgcgcccgtatttaaatcttgctttacaaagttcaacagcagcaggtgccttgaactcactgcctggtatgtaaggctgtacagtctggctgccctttacatcttttctcacccggcctcttacattagacggccccggttcccatgcggccatccgtgcacattggttcagcgtttcacaatagctcacactccccagtacctgcccggtatgggtaacagctccgtcccttactccgtttattaaacgcagttcaattggatcaattcccaaacgttcagagcagatatccatcgttgattcgattgcaaaggtcggctgtaagattccgaacgttctcattgccccggaaggcgtattgtttgtatagtaaccttttgagataaccctgacgttctctatttcgtaaggtcccgctcccaatatggctgatttagccactgttccttttgtggaaaaacaataggctcccccatctgattttaaatctatttcaactgcttgtattttgccgtctttcctcaatccgattttatggtgaattaaaacaggatgacgtttacagcttccaatcatggaatcatttctggaaaagaccagctttacaggccgttttgttttaagcgcggcaatggctaaaataccctgataaatcatatcctccttgccgccaaagccgccgcccacaggcgtcatgataaccctgattttattgatgggcatgtcaagaattttcgccaaaagcatgcggtgatgagtgatatcctgatcacatgattttaccaccaatactccgtcaggatcgcaatacgcaagacctgcttccgtttcaagataggcatgatccacacattgtgtagaataatcctgttcaacaataatatcgctgtttctaaaaccgttttcaacatcgccttttataacagatgtgaaagaaaccacgttgtccgggtaatcatcatgaaccactgatttacagccaattgcatcggcaataccagagacaacaggaagcttcctgtatgtaatctcaattaatttttcagcttcttccgcctcttctaacgtttcagctacaatagctgcaaccggttctccataaaaacggattttaccctttgccagaacgggctgatcatgatagtagacgccaaacccatcttcgcccggcacatctttactggtaataaccgtttcaacccccggcatcgtaagtgccttttcataatcaatcttcagtatctcagcatgaacctcccggcttctgacaaggtggacatgaagcattctgggcatcgtcatgtcggccgcatattccagtgcgcccgcagccttccccttggcgtccactctctctatccgtgaaccgatgattttgcctgtatccggaacaatggaatccagacaatcagcgctttggtcatgattcaggatatcccgtgccaattctatggcttcaactattttgacgtagcctgtgcatctgcatatatttccgccgagacgtcttctaatttcgactttatcaggatgcctgttttcttttaatatggttgtcgctgccataatcatacccggagtacaataaccgcattgaacagccccggcttttatgaaacatctttgtataatactcaacccgtcagttccaatgccttctatggtcagaatctcacagtgattggctttgataaccggtatcatacagctctttttcagtacgccgttaatcaaaacagaacaagttccgcactctcctgcattgcagcccttttttgttccaatcaaatgaagctcttctctcaaaaaatccgcaagtctcattgacggagcaacatatttacaaacttttttgccatttacttttaattctatctttacaagttctgcattcataattttccactcttttaagatgcatttttgcgtcttcggcatttggtcaacacggtacaatattaatttctgcaagtgattcataaagaccggccagcaaaaagtttctgatgactgtctttctatactctcttctgcttctggacttaacaatatctccgggaatacattcggccatcttcagaatcatatcctttgaaatacggtttcccttcaaattgtcctcgatttcatttaatcttacaggagccggtccgattcctccaaacgcaattctgacatccttaaaatattgattcgtttcatcggcctttactaaaaaggcagagttcacggttgaaatacacaaagagcgtctaagcccgacttttttaaaggcacacccgtaatctttcaatatggggcatgcaactgactggataacctctccttccgacaacgaagttttgccaacccctttaataaaatcagatagcggtacatcactcatgcaaatatcgttatcgttttgcctaatcgtatgaaccgttgcatccatggccaataaaggcggtatcaaatcagcgcagggagatgcgtttgccaggttgcctccaactgttgcaatctcccgtatctgctgatctgcaaagtaactggctgcatgcctcaaaacaggcacagtgtcaattaattccggttcttctaaaaactgttgtattctggtatttgccccaattgttataaacccgcatttagattcaattatggaaaaatcttcaatgctgctgatatcaattgcagagtcctgaccgttaaaaggagtcctttcttctgcaaacagatcggttcctccggaaataatatcaaaggaatgagcattatgttccatcaaacggaaaagttcttcctttgatttcggcatataatattttttgtattgaagcatacaattactctcctagcccggaatcttcacaactactttgattgcgtcgtctattctttcttttgaatatttcagggctgtaagcagatccccaaagccaaatgtatgagtatgaatcaaggaggcgtcaaagcgcttttcgctaatcagggaagccgctctgtgaacagcgcttctgccttcgcctctgatgccaaagagagaaatgttattgcggaccaaagctgccacatcaacctcaacaggctttgacggaaaagcggccagacagattcttccgccccttttgaccatattggctgcttcattgacagcatttggggcgccggagcattccattacatagtgaacaccttcaccatttgtaatttctttaaccgccttgacaacatcctggtttctgacatttacagtgtaatctgcccccagttttttaccaagctcaagtctgttatctcttgtaccggtcaaaattaccggattggcgcccaaagccttagcgaccgcaaccgccatcagaccaatggggcctggtccggttacaaccaccgactgacctgcaatcaaaccgccaagggtatctaaaccatacattgcagttccggccgtcacaatcagggttgcctcttcatcagtaacattgtcgcccacatggcacaacgtatttacattgttgatagcgtattccgcaaagcctccgtccgttgtaaaaccattggctctgtggcctttatcgttgccttcgtagtttttgccataattcaggcacgaagtatacatgccctcgcggcagcgctcacagctggaacagccggcatggatttccactgccactctgtcgccaactttatactcatcaacaccatctcccagcttaacaacggttcccatatactcatgtccgggcgtaaagcccttattaaaaggcagaccgccttgaatcatagcgggtggtccgttttcaatgatttccaaatcagtggcgcaaatagccaccgcatcaatttttacaagtacctctgactttttaggccgcggaaccggtttctcttccaacgtaagtactccaggatctcccaagacccatgctttcattgtttctggaatttcataattcatagaatatttcctccttttttattgtacatttttttaagtcatccgttttcacaacaacacatgaccgtttcctcagataatgcagtgctcttaaaaggcctaaaagccaatcgtgtgtttcagtttctggaccctttcacaccaatttccaacattccagtccccaaaagaaccaaggccggacagctcgtctctgccgtaatatacggggacatgcaccagggacagaccatcatactcatatgcctggcttaatgctttttcaagttcctcggccgtagctccgccatagaatcccttcacccctttgactgcttctgccatttgaacgtaatctactataactgaatcatcggttttatactctacgtcatattgagagtgctgcagactggtaatagcccccatacgccggttatcaaacaaaacaatcatgcctctgagtccatgctgaaccccgtcaattaatatctggggattcatcataaagcttccgtcaccggtaaaggccacagggtaatcttttcctcctgccagtgcaaaagcaagcatggaggatactgcaaatcccatataggatgagcctgtgtctgttattgtttgtcccggtttttcatctgttacaatctggaacccgtttgcctgaacatcccccgcgtcaaatatttttacgcagccatgcatatccgcaaagtccactgcctttttgatggctgctggctctgtcagaatggactctcccctcttttcatccaccaagacaggattgtcatatcttagctgcttataggtctcccactccattctcttatccgtacattctttcagccactcagggtcagatgttttattttcagtttttttcagcagctcaattatttttaagagtacttcttctgcatcaccctgtatgcgcacagaattattatattgggccaggtcatcgtaatcgcaattgatatttataattttcttagccttacgaaacgaggttcctgaactgtcccattgacaaacgcctcttgctccaatggcaatcattaaatcacattcgttcatagcgtaatttccgcatattgaacccttggaaccgccaacactcatattgcgcttttttgaatatggatataagcccggtacctgcggtccgtgtacatatacagcatctgtcagttctaaaaattcctccagtacttcggccgtgacatctgctgctccgcctccaactttgactgtaatcctggacgaatcgaggatagcctccagtgcggcgttgaaaacgctcatatctgtgcttataacttttgactcctctgatttttcagtaaactcaagcagattgcagctttccattaatttgggctggatattcatgggaagaagcatgtaaaatggtgtacgttttgctctaccatggactgccgcatctcctcttttcaacgctgtaaacactgcttccggcgtatgcagcgaatatgcaggcccaaatgttgacaggagccgcagaaacagttcctgctctcttttggggatttgctgcatgttaggcccttcactgtggctggtttcatcacccatcaaataatagacgccaaggccattggccaacggaaccagcgatccggcagcggcctgtaaggcacccggtccaatggaagtaaaaaccgccggaacctcattatatttccatctgagcattgccgccacatgggaagcttctacttcgttccggacattaaccgtcttaacagcactttcttcttcatatatacgcagcacttcaccgacatcagtcattccatgaccgaaaatacccacaaaggtcttcacaccctgatttattaaccctaacacaactgcctcgctgaggctgatgtcctgaaattgttccaggctgcccgcttccacagctttacgaattgtgccgtgtgttttaatctctttcgcacgttttcttctctgttccatcatttcattcataattattcctctatatccttcttaatttcatgtgcttccatcttccccgcctctttctagacatttgcttccatttaaacttacttcctccttctggtaatcagttcggttaaaattaccgctttcttggatttgattatatcataacgagaatatgttacaatacacaatcgggaacttgattgcgcattatgcaaccatgggtaattttgtcttttttcaacaaataaacaaggtatttatagtcatatttgccaaagtagtgttaatgtaagatatatgttataatgagagaaatccatatggggtgggggattcgatccaaaactgttggggaaatcggtagataacataaaaaatattgatgccggaattgataccggcaaggattcttataggagcgataaaatgatacaatctcttgatcgagcaatgacaattctgtcaattcttgaacagaaaaacacggcaagcgttacagaaattgcggaagaattaggtgtaaataaaagcactgtctcccggttaatggagactctgaaaaaacatgatatggtgcaggcagatcctgcaacaaaaaagtatggcctgggctttaaaatcttatatttgggagaaggcgtaaaacgtaatattaatatcataacaattgcccgtccctttttgacaaaactttatgatgaactggatgaaagtgtacatttatgtgccttcaataacgatgcagcctatgtagtagatcaagtccagtcaaataaggtatataacctgtccgctactgtcggcatggcggagccgctgcatagttcctctgtcggaaaatgcatccttgctttccgcgcccctttcgctgctgtgcgtttgttaaaggactaccccctgacagcttatactccgaaaacaattacagacatggacattctgatggaacagctggcaatcatacgcagccagggctatgcagtggacgacgaagagatagctttaggcgtcagatgtatcgccgcccctatttatgattatcgcggcgaagtaaattacagtctgggcgtctcaggaacaaccaacaatataaaaccagctgccatggaccggtatctctcagcactgctgtctgccagcagccaaatcagttctgcgctgggttataaatgcggcagacaacgcccggaagttcaaccacccgttccgtatggagatagcggccgggaagaataaaacggctgagagtacagaaaagcgggctccgaagagtccgccatccatggtatgccgcatttatcaactgtttttatcccctttattgtttctgtcatggtaaatgtaattgcccgttacatatgcaggggttagacagaaataaggacgacaactaactcaaatgaaaccctcaggaattgcagtcctgagggtttccctttgtgcttcaaatagatataatctcttttggctgtttatattatatcaagcaccgattacaaaattacttaatagtttgtaataaaccataatgttacttattgttcaacgctgcctgtgctgctgccagacgtgcaatcggaacacggaatggtgagcaggatacatagttcagtccaatcttatggcagaactctacggatgaaggatcgccgccgtgctcgccgcagataccgcacttaaggtctgcctttgtggagcgtcccttctcaacagccatcttaaccagctgtccaacgccttcctgatccagccttgcaaatgggtcagactcgtaaatcttagccttgtagtaggaatccaggaacttgccggcatcgtcacgtgagaagccgaaggtcatctgtgtaaggtcattggttccgaatgagaagaagtctgcctcttctgcaaccttgtcagcagtcagggctgccctcggaatctcaatcatggtaccgatgtggtactggatatcggagttcttctccttcttaaccagttcagcaatctcaaccactacgtccttaacgtacttaagctctttcttctcgccaaccaatggaatcataatctcaggaacaatgtcatatccgcactcttccttaatctcgattgcagcttccatgacagcccttgtctgcatcttggcaatctccggataggtaacagccagacggcatccgcggtggcccatcattgggttgaactcatgaagttctgcacacttggctttaacatcctcaaccgtcattcccatatcatcagccagtgccttgatgtcatccggatcggtaggaacaaactcatgcagaggcggatccaggtaacgaacggtcataggtcttccctccagagccttgtacatggccttgaagtcgcccttctggaatggaatcagctcgtttaatgcttcttctctctgcgcaactgtctcggacagaatcatcttacgaatcttcggaattctctctgcgtcaaagaacatatgctctgtacggcagagaccgatgccctcagcacccagcttaactgcgttcagggtgtcggcaggggtatcagcgttggtgcgtacacgcagggtcctgaactggtcagcccactccatgatgcgctcaaagttaccgcttacagtagcttcctgtgtagcgatgtcacccttgtagatctttcctgtagaaccatccagggaaatgtaatctccctcatggaatgtatgtccgccaagttcaaataccttagcttcttcgtcaatcttaatctcgccgcagccggatacacagcaggtacccatgccgcgtgcaacaactgctgcatggctggtcataccgccgcggacagtcaggataccctgcgcagcgtgcataccctcaatatcctctggggatgtctccagacgaaccaggataactctctcgcctctgccgcccttgccggcatccttagcctcgtcagctgtaaagtataccttaccagctgcagcgccaggagatgcaggaagcgcgcttccgattacttcgccggccttcagtgcttccggtacaaaggttggatgcagcagctggtctaaagacttagcctcgattctgcatacagcctcttctggtgtaatcatgccctcatctactaaatcgcaggcaatctggatggctgccggagcagtcctcttgccgttacgtgtctgtaagaagtacagcttgccttcctcaatggtaaactccatatcctgcatatcccggaaatggttctccagcttcatagccagatccataaattccttatagcactccggaaggtcctctgccagcttggagattggctgtggtgtacgtacacctgcaaccacgtcttcaccctgtgcattaatcaggtactcaccgtaaattccctttgcgccggtggatgggttacgtgtaaacgcaacacctgtaccggaggtctcgcccttatttccgaataccatggtctgaacattaacagcagtaccccagtcgccggggatatcgttcatacggcggtatacgatggcacgtgggttgtcccaggaacggaacacagccttaacagcgcccatcagctgctcggtaggatcctgcgggaaatcctcgccgttcatagcttctttgtaaacagccttgaattttgctgccagctctttcaaatcatcagcagtcagatctgtatcaaaatgtacgccctttgcttctttcatctcgtcgatgattttctcgaagtaggactttggaacttccataacaacgtcagaatacatctggatgaatctgcggtaggaatcgtaagcaaatcttgggttgccggttttctttgcaaatccctcaactgcaacgtcgtttaatcccaggttcaggattgtatccatcataccaggcatggacgcccgtgcgccggaacgtacggaaaccagtaacggatcctctgtatcgccgaacttcttgccattgataccttccagccaggtaattgcctcaaaaatctggtcctgaatttcctgtgaaatctgcttgccacagttataatattcggtacaagcctctgttgtaacagtaaatccctgtggaatgggcattcccaggtttgtcatttctgctaagttgcagcccttgccgccaagaaggtttctcattgccgcactgccttcgtggaacttataaacccattttgccataagttaattcctcctcatgttcttgtagactggcattctacgctctgttttatgcctttcatttctgaacggaacaaatatatatgtcttgtccgtccacctcgttcattatatcacaaagatttcgcgagtaaagagtttttccgtgaaaatttgttaaattttaaggtaaaatcgctgtaagcactttcattttctgtcattttcacatatgcgttgttcaatcgtatatgcgaactttcagtgttgtatgtacataactttgcgaataaccctgaatccgtcaaaagcccagcccggttcatttccgtctcaattatgtaagctcttccaatattcgggagcaaatggctggaccgaaaccatatagccaaagcaaaatggacatacttaacttcctggctaagattattttacaccaaatcaagtgtcatgttaatattataccttaaaccggtagcacataagctgtccctggtttaaccgtacctaaagttttatacctctttatcccttgttatctctaggaactttccacatcttaccttttctttccctctcacttttttctagccgtgttactttcggtagtatttgtggtagtacaggagtttcatactaccatgaggaaaagtaatgttatcatccttcttgttccatagacatctccatctgtataagatataatgaatatgctgtcgactctttccagcaggaaggaggtgtctgcatggaactcttaactactttcatattttctgtcatggcaagtgtagctggctactacatatgcaaatggttagacagaaaacataaagacagctaacctaaaatgaaatcccgtgtactggcatacacgggatttcgctttgtgtctacatggtcttaactactttcttagctatctttatattacactaaatttagtgttatgtcaatatcacaccttaaaccggtacccaaccccccatatcgtctcaatatactgcggtttggccgtgttaaactctatcttttcgcgaatcttcttaatatgcaccgttacagtggcaatgtccccaatggactccatatcccatatcttgctgaacagctcctctttggtaaacacatggttcgggttctgggcaaggaaggtcagaaggtcaaattcctttgtggtaaaggttttctcctccccgttgacccacacgcgccgggctgtcttatctattttcaggccgcggatttcaatcagctcattggccggctgcccgctgccaataaggcgctcatacctggccatgtgcgccttcaccctggccaccatctcgcttgggctgaatggcttggtgatataatcgtctgctcccagtcccagaccgcggattttgtcaatatcctcttttttggccgaaaccataatgatgggcgtgttctttacttcccgtactctcttacatatctcaaatccatctgtaccgggcagcatcagatccagaatcaaaagatcatagtcttccttcagcgccttatccagaccggaacttccgtcattttcaatctctacctcaaagccggacagctccagataatccttctctaactctgctatgctctcctcatcttccacgattagaatcttgctcatcctgtaaaacctcctgatattttcttagaacaaaatgtatctctgttccgattccttccttgctggtggcccatatacgtcccccgtggtcctccacaatcttgcgcacgatggataaacctataccgcttcctccctgggctgaattgcgggaggaatccgtgcggtagaaccggtcaaaaatattgggcaggtcctttgctgctatgccttttccattatcttctatttcaacctggataaaatcgcctacgtcctttatcctaatattgataatgccctttttcttatccagatattttacggaattactgatgatattattgatgacacgcttcatctgctctgcatcggcaatgatgaccacgtcttcatccacataattgaaatatcccagctcaatccccctggcttccatatccaggccaacctcctccacgcagtcccggaaatactgggccacgttgatcttgctgaaggtatagggaatcttatttgtatcaattttggaataaaaggtcagctcgtcaatcagcctgtccatatcattagacttattgtatatggtacggatgtatttgtccagcttttccggcgaagacgccacaccgtccagtatgccttccacgtatcccttgatagccgtaatcggtgttttcaaatcgtgggaaatattgctgatcagttccttattatccttgtcatactgtatcttgtcctccgcgttctccttaagccggatacgcatttcctcaaaatcctggcacagctggcctatctcatcatccgcgtccacatccagtgtgaattccaggtttccgtcgcgaatcttcttcgtggcctcctgaagcttgttcagtggactgagaatggaacggtatacccagtatgtcagcacaatgcccgcaaacaccagaatagtgacacccagtatcagcatctcccttatcatggattttacttccggtatcaggtcatccacattggaaataataaaagcgcttccttcctggccgtccggaaaggtgaaatccatctgcttgatcaggtgctggctctcgccgtccagataaatgccgccctgtaagtctcccttcatcatatcaaacctgggcagctgggcgcatatggcctcccctgcggctttattgctgtcaccgcagtacagaatggtatcgccttttcgcacaatcagatatgcataatggcttttcagttcagcgttgaccttatccagatatgataaatcgttgtagagccccggatcgttgtccagtgtattcctgatgtcctcctgggagcgcttggtaatacggttaaatatctgcatggaattgcctgagaacagatccacctgctccgtaagtccgtactccttggtgaaggacctggtctgataattgctgagtgcaagaaccagcagataaaacagcagcatgggaacaatggttatggttaaaaacgccaccgcaagacgggtcctcagtttcataagccccatcctcctttgtcatgatacggtctgacattatgagtactgcatcgtataagcttcctatacaatgcagtactcgcttccgtccgaaaacaaagacagtctgtcatccgttattgctagtatatcacaataactaattttcgtttataaaaggtttctaaattttatgaacaaaagtcctgtttttccttgtttcctcccggatttctgatataatgataatattgtccttataaagcaaggaccaaaaggacgaatgattggggttgtattttatgataggattttacagctacacggttgtattgacatatttgggactggcttccgcagccatgggcatgattctcaccttccaggggtttgcaaaatacgctttgttctgtcttgcgttctccggcctgtgcgacatgtttgacggcaaggtggcccgtctgaaaaaagaccgcacggaagatgaaaagcgcttcggaatccagattgattctctctgtgatgtggtctgtttcggggcttttcccatgatactgtgctattccatcggtatgcggggaccggcaggcatctccatactggtattctatctgattgcaggtgtcatccgcctggcattttttaatgtcatggaagaaaaacggcaggatgagacagatgaagcccgcaagtactaccagggacttcccatcacctccatagccattattctgcctctgttctgcaccctgcgccctctgctgggccacagattcctgtcagagcttcacatctgcatcctcaccgtgggtctgctgttcatcattaatttcccgctgcgcaaacccggctggaaaatgctgacccttctggtcgccattgtatcctgtgcactgattaagatatatttcttctgataataaagaaaggtgtgattccatgcaatatgcagacagaaccggccgttccctgggcgacagcaccctccaggaccgtttcctggagaatctatatgccagctttctgggacgtatgctcataaaaccgctggtccatccggctttttccaaaatctgcggcgtttttctggactcgccactgtcagcgcccatcattcccggctttatgaagtctgccggtatctgcgccgagggctgcgaaacaccggccggcggaaggtaccgctcatttaatgccttctttacccgcagaatgctgccggaggcaaggcctttcgacgccagggaccatatattgtgcagcccctgcgacgggtttgcaagcgtttatcccatccacaataacatgcgtatcaccatcaagcacacccaatatacgctggagcagcttttaagggactccggcctggctgcccgctacgccggcggcaccgcccttctcttaaggctcactgtatcagattaccaccgctatgcctatgtggaccgcggacggcgctcctcttaccgcaggattcccggcgtgctccacacagtcaatccggcagccgccagccgccgtcctgtctacaaagaaaactccagggagtattccctgctgcgcaccggttccttcggcacagtgatgatgatggagataggggctcttatggtggggaaaattgtaaatcaccacaaagcttataccagcattgatgtgttccgcggtcaggaaaagggctactttgcctttggcggctcctccatcctgctgctcttccagcccggcaccgttgccattgacagagatatcatgcgcaacactgccctggatgtggaaaccagggtacggatgggtgaagccatcggccaggcaatgacagcaattgaaatgaatccaaatgaaatgaatccaaacgaaatgaatccaaacgaaatgaatccaaacgaaatgaatccaaacgaaatgaactcaattaaatgatcccaatttaaatgttcccaatttaaatgttcccagcacaaaaacctccgcagttccttcccggaaccgcggaggtttttcttctgcatttccatgcagtgtccttttatcttctaaaacataaacttctcagcaaagtagtccttaagctcagcaatcggaacccttacctgctccatggtatccctgtcgcggactgttactgcatggtcttcctctgagtcaaaatcataggtaatacagaatggagttccgatttcatcctgtctcctgtatctcttaccgatattgcccctgtcgtcaaactcacagttgaaatatttggaaagctcggtgtaaatcttttcagcaccttcattcagtttcttggacaaaggaagcacacccacctttacaggagcaatggccggatggaagtgaaggacagtccttacatcgccttccccgatttcctcttcatcataagcagcgcacaggaatgccagcgtcacgcggtcagctcccagtgagggctcgataacataaggaatgtatctctcctttgtctcatcgtcaaagtaggacatatcctgtccggacaccttctggtgctggcttaagtcatagtcagtcctgtctgcaatgccccaaagctcgccccagccaaacgggaacagatactccaggtccgtggtagccttgctgtagaagctcagctcctcaggagagtggtccctggccctcagctcatcatccttgattcctaatgaccttaaccagttgatgcagaattccttccagtaagcaaaccactccaggtctgtgtcaggcttgcagaagaattccagctccatctgctcaaactccctggtacggaatgtaaagtttccgggcgtaatctcgttgcggaaggacttgccgatctggccgatgccgaatggcaccttcttcctggaagttctctgtacattcttaaagttaacgaaaataccctgggcagtctcaggacgcaggtaaaccgtgctcttggcatcctctgttacaccctggaatgtcttgaacatcaggttaaactggcggatatccgtgaagtcatgggcgccgcagcttggacagcagatattgttgtcatcaatgtactgcttcatctgctcctgtgaccagccgtcaacagagccttccatctggattccatgggcgtcgttataatcctcaatcagtttgtctgcgcggaatctctctttacactgcttacagtccatcagagggtcagagaatccgcccagatgtccgctggcaatccatgtctgggaattcatcaaaatagcacagtcaacgcctacgttgtaagggctctccatgatgaacttctgccaccaggctctctttacattatttttcagttccacacccaggttgccataatcccaggtattggccaggccgccgtaaatctcagaacctggatacacaaagcccctgttcttggccaatgccacgattttctccattgtcttttccatatctgcatcctctcttcttaataattatagatttaatataaattaaattataagaattactttaatatgatgtaactggttccctctccggaagtctgcacccggttggaatccttcaggacgcagccctcgcttacatactggatttttttctccgtcacaatgacgccctgtcccgcagccttgaccaccatgctctgtccgtccttaagagctgtctcctggtccaccgccttccccttctcatcctgaaaggaaacctccgcaagttcaccggacatggctgccaccctgcctgtatccagttgggtgaacggcacattataatctccaatctcctgggcaaattcaatgagacggcccggagcgtcgtattccgtaaccaatgtggctgttccgttccccatgctggctgaaacaatggctaccggaagtttctcagagccttccgcattctcataggaagcagccttacccagtccgctgttaaaatcaatgattttctgtccggccgagttctttagttcgtcctccgtataactgccctgctggtaagtctccaccgaagcccacctgacactgccgtcgcctgccacgtagacgctgttctcagtgggggcttcggctccccccatgcctatcctggagcatcccgtaaccaccgcagcagccgctgccagcagcagaatccccttcacaatcttcttcataaatattccttcctcatacttctttgccgccgtaccgggcatatggacatattatatcctctgaatgccataatttcaagccttatgacggattttatgctgtcagggtttccaaaatttccagggaacggaactcatggcgcacaaaataccgtctgcttttttccacaacagactcaaattccttcagcacttcttccttcagcgcaaattgataaagggattccgacggtgagcagataacatactcccaggcataatgacaggaatcagagaccggaaccggagggtcctgggtatattccccgttgattaccatactcttaagctcgaaaaccctgcgcaccagccggttgggaagggccggacgcaaaagagctctgagggactggtacaggagctttaacagttctgtgccgtccagattttcctgggcgaaataagctgcggtttccagaaaataggagccatagcaggctgcctccatgtccgtggacagcccgtcaaaataattggtaatctgggctgactggagattgtaggcattcctgccttcataaaggttaaaattgccaaaacaaaaaggcctgctggccgccatcagaggattgcccggttttctggcgccatgggagaaggccgtaatcttccccctctcccttgtgagcagcaccagacgccggtcaaaatccccggagggagccgaaaggagaaccatcccagttaatgttactgtctctctcatttccagtttcttcctcctctcagcatttccatcagacccttgtcaaatccctgtggtttttccaccgtcagcgttgtaaaaccaacagttatcaacattaatgtgtgagattttttctcaaatttctttttgattgtagccgtagttcttcatatacagctcgctgtcccgccattcctttcttaccttaacccacagctgcaggttcacctgtgtatccatcatgctttcaatctctttcctggcctctatgccgatgcgtttcagcatgctgccgccctttccgataatgatgcccttgtgagattctctctcacatacaatactggcctcaatatcaatcaggccgcccttgcgctccttcatcttctcaatggtcaccgcaatgccatggggaatctcgtcgtccagaaggcgcagcgctttctcgcggataagctcagcagcaatctggcgcataggctgatccgtcaccgtgtcctcatcatagaactgcgggccgtaaggcaggtatttgaaaatcagctcagtcagcagatccgtattcttatccttcaatgcagagagaggtacgatttccgcaaaatcgcagacatccttgtaggccgcaataaaggtaaggatttcatcctggttctttaccgtatcaatcttgttgattaccagaatgattggggtttttacattcttaagctgctccgctatatggcgctcgcctgcgccgatgaaggtggcaggctccaccagccagagaatcacatccacttccttcagagtgtgctcagccacgttcaccatatattggcccagcttattcttggccttatggatgccaggagtgtctaagaagataatctggcccctgtcatctgtgtacacggtctgtatcctgtttctggttgtctggggcttatcagaggtaattgcaattttctgtccaatcaagtggttcatcagagtggactttcccacattgggacgtccaatcaacgtaacaaagcccgatttcttctgtatattctcttccatttaattctctcttccttaaaattagtggtaaaggttcttcacctcaccaaacatgctctcctgggcgcgaatctgctggtcattgccaatcacgcacagcgccctggtgtccagcacagcctgtacaatatcagccagtgcctttatatcctcctgggtcacatccagaatctgttcccgctccttctgcaccatctcatccgtcacaccggaaaggtatgccgacagattcctggctcccctcagagaaggcgtaagaggcgtatcaacgtcgctcatggtgccgatgacatattttgtcatgtccctctcgtcaatggagaagcttctcagataatccggaattccttcatacacctggttggtggcttccaggttggggtccctgtaggataccaggcatccgtcacccgtgcggctgaagctgctcatgcatccgtaagcacctccctttaccctcaggttcatccacagatattcatagttcatgatgacctttaagactctcagcgctcctgtgtattccagttttcttcctcctgcttcctttcccgcaaagctgccgcatctggccacatagttaacctgggacgctgtcttaaagccctcattgcggttgtccggccggaatacaaactcatacgttctcccgtctccctttccaaggactgaacggaaggtcttaagttctgcaggcagcctgctgtagccttctgtatcagctgtgtatgccaccagcagattatctgatgtaaacagccgggcgcagacatccttaagcctggcaatcaattgtcctctgccggaaacatcctccgcgaacctgcggctgacatcctccagaaattgataatatccaacgcctccggtcatatcgttgaaggccgctgacgcagagaaatatgacgaagccctgccaaccgccgctccatgggaagcatcctccatcttcatcctggccctggacctggtctcgtccagaatttcacccaggcgcttttcatcatccagtctggatcgggttagaatctccgccagaatggagaaggcaaagtccagtttatggtacagcacctttgcgctggcaacaaaggcccctgtaaactgtcctggatgcgctgcatccggataagacgacaccgcaaagctcacgccgccgctgttgaggtaaatctcgctggtcagatccccgtagctgtagtgctccgtatccacatatcccagcactgccttaagaagccccacataaggcaggtcctccaccggcacccggctggtgtcaaacagcaccttcagatatccgattccggaggtgaacaggttgctgtggataacgttcactccgtcctccatcttgacctcataagaaaaacggccgccttcccgttcaatgtcctcccgctgcagcataggaattttttccaggtcctcctgctgtgacggctcctcctggtactcctttaactgtctggtccgggcagtcagggcctcaagctcctccctgccaagggattccttataggtcttcagcctttcagccagattgcggtcctcctcagctgtctggttcaccctggggcgcaccgtgataaccgcctcatgaggattatccagcagataccggtgtatcagctgttcaaaatagccttcctccaccgcctttttcagatagtcaaaggttttctggtattccagatggagggtgggcttcccgtcatacagccagctgtccagagaccagagtccgtacataaggcccttgggcgcggaaccgtagtccgcctcgcggtaacggaactcatagaggttcagtccggccaacaggctctttctgtcaatcccctggtcagccagccttcgcagcgttccctttacaactgcaaggaattcacccttttgctccggattggcattcttggcaatgacggaaaaatacggctgcagaatcccgcagtcatagcctcccagtatatcctgaccgatccccgcatcaatcaatgcctgcttcaaaggcgctcccggcgcgttaatcagcgtatattccaaaatctggaaggccacataaagtaccggatccaaatccgtccccaccacggtattgatggaaagataggtcctgtcctttgttccttcctcctctgtgacagagtaggtgatttctctctggaccggctgttcaaagggctgctgcacagctatggccgagtctgcatggcagtcctctctgtcatattgtcccagatattcctggtccagccatgtaagcttctgggccatatccatgtccccgtagagatagatatagctgttggccggatggtagtaattgcggtggaacgcaatgaatttttcataggtaagctccggtatcacggcaggatctccgcccgactcattggagtaggtcgtatccggaaagagcacatttctggtaaaacggtccagaacactttccggtgaagaaaaagcgcctttcatctcattatagacaacgccgttaatagccagctcgtcctccggcgactccagttcatagtgccatccctcctgaaggaatatctttggctccctgtaaatagccgggtggagaacgccgtccagatatacgtccatcagattctgaaaatccttgtcattgcagctggcaacagggtatacggtcttatccggatacgtcatggcattcagaaacgtgttcagcgaaccttttaccagttccacaaaggggtccttgaccggaaacttatccgagccttccagtacactgtgttccagtatatggggaagtcccgtactgtcatcgggcggtgtacgaaaaccgatatagaacaccttgttctcatcctcattggacatcagaaaaatcctggcgccgctttttatgtgttccagcaccatggccctggagtccatttcctccacgtacatctcttctgacacgcggtaagcggccagctcttttaccttttccagattccttccatctgccattgcttcaatctctccattctatcgttcattcagtcatatggtgataatagctattctgccatttttcccgcggcccatacaccggccaactcatatgttccgtccataccgtcacatattccccatgagcctgtccttcaaaatagaagcacattccctcacgcacagatggataaacagaaccgggtcggattccgcagatatgccgtatacgttgtcaaatccccatttttccgctgtaagcctggcacggtaaatatggaaattactggtgagaactcctatttccagcggcttgtccggtgcaatggcataaggaaccgagcctgtctttccgggcatggggatgatctccttcttgtccttcatccggtcctgctctatgacaatcttgctgtaagcaatgttctccaccgtgctggtggaatcggactccataagcagctgcctgggactgaccccgttgtacaccagataatcatacatgacctgggcctcgctgtctgcttcccccggccccttgccgccggaaagcaccagaatggtgtacggattctcctccgcatagacaatggccctgtccagacgctttttcagggaattgcttaccgtgtgttccttgaccctggcccccagcacaatcacataatccaggttggcctttcccggcgtggctgctcccagaaataccaggatacagaggattcccagcacagccactcccgcaatacaggtggtaaccaccgacaccggcacccagcgggggatccgttccatatttctggcataataccattttccatataccagaaatacaagcagggccgcaaaaaacagccatatgaaggcaaatgaggtgcttatgcctgcatacacaactatgattataaaataaacaacgcaaagcactgccagcccaatgagtactccatctaacatcccaaggcacctcctgtctgccggagccaataaagcccaggcgcagtttcttcctcccgaattccggacaatcaattttccagtctcttccagttctcagctttgtctaatccacggtctcttcttttctccgcaggatatcaaaaacagacacatccccggacagcttaacccacagaatctgctttggatggggagcgctctcctgctcattgccctcatggtctgttatggactccactgtaacttccaggttctgtccgtcgggcttcatcacctcaatggtctcccccgcagaaaatttatttttctgttcaatcctgcaccggcccaggctgtccgtttcttccacggtccccaggtaggtgtagctctttacataggtgctgctgtcatatatgtggtcatccgaagtgggcttgccgaagtaaaagccagtggtaaacctgcggttggtgcattttccaatttctcccctgtaccacgccagattcttcctgtacacagacggatccttcagataatcatcaattgccctgcggtaggccctggtgacagtggccacatagagagctgttttcatccttccctctatcttgaaactgtcgattccggcatccatcatctccggaatatactccaccatgcacaggtccttggaattgaagatataggtaccccgctcattttcatatacaggcatatattctcccggtctggtctcctccacaagggaatatttccagcggcagggatgggtgcaggcgccctggttggcatcccttcccacaaaataattgctcagaaggcatctgccggaataggatatgcacatggcgccgtggataaagctctctatctgcatatcctggggtatgtggtcccggatttcccggatctccgccagagacagctcccttgcagacaccacccgccttgcccccagtccatgccagaacagataggtcccgtaattggtgttgttggcctgggtgcttatatggatttccatgtcaggaagaactcttctggcaatggcgaacacacccggatctgatatgatgagcgcatccggcgccacatccctcatctcttcaaaataagcctccacccccggcaggtctccgttatgggccaatatattggccgtcacgtagactttgaccccgcgcgcatgggcaaaggcaattccctgtttcatctcttcattggaaaaattatgggccttggcccgcaggccaaaggcctcacctccgatatatacggcatctgccccgtaaacaacggctgttttcagcacgtccaggcttccggccggtatcagtaattctgtctttctcattccactctctccgtatatttggtactgacggcaactccgtcccctatggggatgatggctgtctccagtccctttctgtgcttaagctcgtagagataccggcgcatcctgctgtggatggtcctgttcctgcgctccactgcaaatctggattccacgatatctccgtcctgaagtacattgtccgatatgaggactcccccttcaggcatcagcgccagaatcatgggcagccagtgcaggtactggcctttggcggcatccatgaacaccaggtcaaaggtctggcccttaagtccggccagcaggtcatctgcatccccttccagaagggtgatacgcccttcctcacctgcgattttaaaatgttcccgggccgccggaatccgtttctcatacttctcgatggtggtgatgcggcagttttccggcatcacacggcacatgagaagagaagagtatcccacagcggttcctatctccaatatacgggccggtctcaaggctgccaccagggtccttaaaagggctgcggtttccctgcgtatgatgggcacccggtccctttccgcttcctgttctatggaatccagcaggctgccctggctggattccagggaacgtatatagtccgtaatcctgtcatttacaatcattgggttccatcctctgctgcatcctcaatccatccgccttccatctcctggtcctcgccttcataggtctgctcattggcctgggcctcctgggagtcaagggcatcctcccctgaccgggacccaggagccgcgtcagccggtatttccccgtctgtctctgccgctgcggctgcaccgtcctgggacgcagctgccgcagccggagatgtctcctggcccgaagcaccgctgtccccgttttccttctcagatgtcctgccctgggacgtcttggcttcagctgccttggcgccgccggactgggccggttttgcactgtcttcggtttccggcttttcattgagaagctggagtatttccttggatgtcatggacgtattaagggtataggtgcccggatagatggtgtcgtagtcatagaacttgctctggaaaataaaggcaaactcacttttaataagccccttatgcgcaagaaactgcgcagcgtcagacacggattcctttgaatcaatctggactaccatatcctgtccgggggcctcgtccactgcctcggcaaaaaatatctcatggccaaaggcatagcccctggcaaccgcctcatacagcagcaggataatcaaggcatataccatgagcttcacggatatgccgattatggtagtggtgattttgttgatttccctagttctattgctcataatccattcctcttatcctgcccggcgtcttcatgaccgcggtatcccggaccggtgtgctgccgcccaggcagcacaccggtccgttatctgttatacctccatgataattggcagaatcatgggattgcgcttcatgcgcttccacaaaaagtcacttaaactgtctttaatgatgttctttatcttaccccagtcgctgacatggcggtccaggcagtcctgcactgcgtcgtacacaatggtgtgggcctcctccagcaaatcctcggattcccgcacatacacaaagcctctggacacaatatccggtcccgcaagcagctggttgctgtgcttctctaacgtcaatactactacaataataccattttgtgcaaggttttgtctatcccgtaatacaatattgcccacatcgcccacgccgaggccgtccacgaagatgcctccgcaggtaacgtggtctatcacctcgcagctgtcctcgtccagggccaccacgtcgccggagttgaccatgacagcattttccttttgtacacccataaactgggccagttccctctgggccatacggtgacggtactcgccatggatgggaatggagaactttggatgcaccagggaataaatcagcttcagatcctcctggcaggcatgtcctgatacgtgggtatcctggcagattacctcagcgcccttcatggacagctcgttcaccacattggccactgccttttcatttccgggaatcggcgtggagctcagcaccaccacatctcccggcacaatggataccttcttatggatgctggcagccatcctggaaagggcggccatggactcgccctggcttcccgtggtaatgagcaccgtggactccggcgggtagttcctcaggtgttcaatgtcgatgagggttccctccggcacattgatataccccagcttgctggcaatatccatgatagtcaccatgctgcggccttccaccaccaccttgcgcccgtatttatacgctgtgttcaccacctgctgaacccggtccacattggaggcaaaggtggccacgatgatgcgcctattctggtgctccgcgaatatggcgtcaaatgtctttcccaccgtacgctcggacatggtgaatccgggacggatggcattggtactgtctgccatcagggccagcacgcccttcttgcccagctccgcaaagcgctgcaggtcaatgggatccccaaacaccggcgtgtagtcaatcttaaagtctcctgtgtgcagcacggttcccactggtgtaaatatggccagggcggatgcgtcctggatgctgtggtttgtcttcacgaattccactctgaagcatcccaggttcacggactgtccgtgcttcatcaccttgcgcttggtgttctttaagaggcggtgctcctccagcttatgctcaatcagggcaatggtcagctttgtgccgtatacaggcacattgacctgctgcaggatataaggcagggcgccgatatggtcctcatggccatgggtgatgacgaagcccttcaccttgtcaatgttctgctttaagtaggtcacgtccggtataaccaggtcaatgcccagcatgtcgtcccccgggaaggccagtccgcagtccaccacaatgatgctgtcctcatactcaaaggcggtgatgttcattccaatctgctcaagaccgcctaatggaatgattttcagcttgccctttccgtccttttttccatcccgtgccttctgtctggccggtgcgggaagcgcctttgattcaccggaatttctggagttcttggactccccggaattcctggatgccttggactctccagaattcctggactcccctgaacctctggccgccttggactctccggaattcctggacgcctttgcgctgccggttcccttggaggaccttgcgccggcgctgtccttggactccctggcagcagttccggtctggttctctcccttttgtccgctcccgctctttgcctgaccctgtctggaacccgtatttttctttttctgggcttccccatttcctccctgttccttggaagcggtctttttctgggccggtcttctattctgggacttcttcacaggctgctcctgtggggccgcagctcccgctgtctcctggacaccggcatcctgggcattgttttcctgtacggcctgattcgttgcctgtgcagctgcctctggcgccacctctgccgtattctctttttcttctaaattcaaattgattcctccaatctttctttctatctatttctcaaggtccacatctgcatcgcttaacagttcttcaaacactttcatcagtgcgtccagttcgctgtcgtcttccacaaactcatacacggcctcagcgtcctgctgtcctgacatatccttaaggatatagcactctccgtcctcgccttccggcgcgtctgtcacaagcagataactccttgcatttatccttgtttcttccaacacataaaaatccacggattctccggaatccgtcaccatggtaatcatatcttctctcgtcttttcttccatttcttctctcctggcgcctgtctgtcacgcctgacgcgaccggccgcattgtccatgtcccaattgcatcctaactatgctgcaggctgtccagatacccctgcagaatcatggctgccgcaatttggtccacgcttttctttctgttttccctacgaacaccgctttcaatcagaacccgttctgccgccactgtggtgagacgctcgtcccagaggataacctcaagaccggtacgcctttccagggccactttgaactcctgggtcttttccccgcgctcgcccactgtattgttcatattcttaggataaccaagaacaatacgttcaatctcgtattcaccaattaattgctcaatcctcgcaagggtctgacgcatcttattctcgctggccctggtgattgtttccactgtctgggcagtgatacctaaaggatcgcagactgccaccccaactgttttcgagccaaaatccagacccattatcctcatattcaattcctccggtaaacgcaaaaaatcggaatgcaccataaaagcagctggcctatggccaactgaatgcatcccactcatatccatccgtacattactgtaaaggcccgtttccgggccttctgttattcacgccgcatatcctgcctgcccgtggcgggccggatgcccctggagcgcctctgtaaattgccccggaaccagtctgaaacagttcttatttcagacgggcatcaatatacacagccatcagttcctccagaatctcatcccgctcaaccttcatgataagacttctggcgcccttatggctggtaatataagtcgggtccccagacatgatataacccacgatctggttcacgggattataccccttttcagtcaaggcaatatatacctgctccagtacgtcgcttacttctatctttttgtcctgaacagcttgaaaatattgagtatcttttatattgcccatgtcatcacgtcctttaagtattcttctctattctacattatattttgctattcggcaatagattattttcttaattttttctaattattgtcatgtttctgtaaaatgtcgcacaatctttccgtcttttcggaaatatgttccttttttcaagaaaattccacctttaacatctcatcgttcagcagcccggaagcaaaaagctccataatacgcccgccaaactcttcccggttcattccgtcctccagcggcagggctgctctgacatactgaggagtatggcccatcatataccattttcccccaatctcagctgcctcctcaaacaggaccgatacccggctgcctgcaaagcgctccctgtactcacgcgacatggtcttttccagctccagcagcacgtcgctgcgccgggcctttacctgctccgaaacctggtcctccatgacagccgccctggtgccctggcgtttggaatatttaaagacatgcatctcataaaaacgcactgtctccagaaatcttctggtctcctcaaactcttcctctgtctctcccggaaaccctgcaatcacatccgttgtaatggccgggtggtcaaagatctccctgagtatgccgcagcgcctgagataatcctccgtggtataatggcggttcatgcgttttaatgtggcatcgcaaccgctttggagggagaggtggaaatgagggcagaattccggcagtccggccagcttttcggcaaattccctggtgatgattctcggctccagggaacccagacggatgcgctccagtccctccacccggtgaatccgctctatcaaatcccacagggggccgctgtcccagtctccgccctttaccggacttccttccatgtgctctgttccgtaggagcttaaatggattccagtaagcaccacttccctgtacccacgggccaccagccctttaacctcagcctccacatcctccggcttccggcttctgaccctgcctctggcataggggataatgcagtagctgcagaactggttgcagccgtcctggaccttgataaatgccctggtatgttctcccaggcggctcacatgaagctcctcatactctcgggcccgggcaatatccagcacatagcctccttcatccccctgcctgtccttcatgtattcttccagaatatccgccagacgcgccttattgttattgcccacaatgatatccacgctgtcatcttccttcagggcgtcggatgccacctggacataacagcccgccgccaccaccacagcctcaggatttaacttctttgcgcggtggagcatctggcgggatttgcggtccgcgatattggtcacggaacatgtattgataatatagacgtccgccttctggtcaaagggtacgatttcataaccgcgctcctctaactgctgctgcatggcttctgtctcataagcattcactttgcatcccaggttatgcagggctgcttttggcattgtaaaacctcctgtttacggtctgttgcgaccctttatacatggcttgcgccctatggaactctaaccaaattaccatattgttactgcgtttttcatgcaatctcactattgacttttagtccccctgtctgtagtattaaagcaaagcaggattcactgcaaacataatccatacacacttaccacaaggagggtttttctcatgaaaacagttcgtatttcgttaaattccattgacaaggttaagtcatttgtaaatgatttatctaagtttgatgttgattttgatctggtttccggcagatatgtgattgatgcaaagtctatcatgggcatcttcagcctggatttatccaagccaatcgacctgaacatccatgccgagagctgcgttgatgacattctggctatcttatcaccatacatcatcgcttaatctgctgattcttcatccgctgcccaggcagcgtgacaaagcacataggtcatcagaaaccatcagagtctgccgaggcagactcttttttgcgtttgttttgacgtttgctccttgagcggactggtctgtttttgtgtttgcttccaggtcagaccggtctgtttttcccttacccctggcagagaatctgttccgtggtctccagagcagtctccaccagctggtcgattttctcctccagacggcgctccgaactgtgaattacattgatgttgggctttgtcaccggatgcttggccacaaaaatggtgcagcagtcctcgtaaggctgtatggatgtctcataggtgccgattttctcagacacatccacgatttcctgtttgtcaaatccaatgacgggcctgaacacaggcatggtgcacacctcattggtggctgccagggactgtaaggtctgggaggccacctgtccgatgctctcgcctgtaatgaggccgatggagccggtgcgctccgcgatggtctgggcaatccgcatcatatagcggcgcatgatgatggtcagctcctcatgagggcacttatcataaatgtagagctggatgtccgtgaaattcaccacatggagattgatggggcccgcgtatctggccaccaggtttgccaggtccaccaccttctgctttgcccgttcgctggtataaggcggggcatggaaatacactgcgtctatcttcacgcctctcttggcaatcatgtagcctgccaccggactgtcgatgccgccggacagcagcagcatggccctgccgttggttcccacaggcatgcctccgggtccgggtatcatcagtgaaaacaggttgatcctctggcgcacctccacatggagaatcacatccgggtgatggacgtccacacgcatctggggaaacgcttccagaatcacctcccccatgtcgcggttaatctgctccgaagtcacgggatactgcttgtcccccctgcgggcatttaccttgaaggtgatgttcttatccggataaacctggtccatgtactccaccacatgttgtttcaggttctcgtaatccttgtcctcaatctgcaccatggggcagatatccgcgatgccgaatacacgcttcagcgcctccaccgcatcgtcgtaatcatagtctgtttccgccttcacatagatacgtcctgactccttggtgacgtcaaactgcccctccacgcttttcagcgcatagcggatctgctttatgagggcatcctcaaacatataccggtttttgcccttggtgccaatctctgcgtatttaattaaaaatgactggtactgcatcttttacctctttctgtcgcttaatcgtccccttcattgtcctgcggggccgaatcatttacacggttcagcctctgtggtaccttctcagcaccggcagaagctcttccaggacttccatgcaataatctatctcttctcttgtgttgaacacgccgaagctgaatctcagcgtggaatccagcagttcctgcctgaccccgatggcctttaaggttccgctgattgccgggtgattggaagaacaggcggatccggaagaaacatagattcccttgtcctccagggcgtgaagaaggacctcgcttctcacaccctgaaagcttgcgctgacaatctggggcgcgctctccattcccttgcggctgttgacagtaacgcccggcagggacgccatgcggtctgtcatatagtctttcaggccggtaatatactccaccttctgctgatggtctgtgtagatttccctggccgcccggcccatgcccgcgatgccaggaacattttccgtgcctgaacgcatgtccttttgctggcctcctccgtagagaaggggacggatcttcaccttctcgtctatatagagaaaacccactcccttggggccgtgaatcttatgggcactgacagataacaggtcgattccctgcttcttagggcgtatggtaagcttgccgtaagcctggatggcgtccacatggaaaaggatggccggattcttcccatggataagggatgctatctgctccaccggttcaatggcgcccacctcgttgttcacatacatgatggataccaggatggtgtccggacggatggctgcttccagttcctccagggaaatgtggccctggctgtccacagacagatatgtgacctcaaatccctgctgctccagataggccagagggttgtaaaccgaggcatgttcgattctggtgctgatgatgtgctttccggccctctggttggccatggctgtgccgatgagagccatgttgttggattccgtgccgccggaggtgaacaggatttccttatccctgacctttaatgttttagcaatgtccgccgctgcctggcgcacatactgctctgcctccattccctttctgtgcttggcagagggattgccgtaatcctccgtcatggtctttaccacaatatccctcacgctgtcaaacacgcgggtggtggctgaattgtcaaaatatgcttccattatacaaactcctttacagcgccccttccagccgcatcataagcaccgacagcagggccagccccgctgtctccgtcctcagtatcctgcgtcccagactgatgggccgcacgccttttgaaagggccaattctatctcccgttcatcaaaaccgccctccgggccgataaacacagcaatgtcctgtcccggccccgcggcatccagctccgtctttgtgccgtccatccccgcctcatgttcataaggaatgagacgcacggaaaatccctggctttccacatagtcaaaggcttcttttaaggtcataatgccggataccctgggaaccaggctccgtttggactgcttggcggcgctttccgcaatggcctgccaccgcttgaccttggcctcttcctttttggggtccagtttaaccaccgtgttcctggtggtcacaggcacaatgcctgccgcccccagctccacagccttctgtatgatgaactccatcttatcagatttgggcagtccctgaaagagccagattctggaaggaagctctctcccctcctcctctgtctcaagaatccgtaccgtgacttcctgtccggcgatttcctccgcctgacacaggtagtccctgccggtaccgtcgctgaccagcatttcctccccctgccttatgcgcaggacattctttatgtggttcacgtcagatccggttatccttatcaggccgtcctccacctgctcagggttcacaaaaaaatgatgcatggctttccctcaggtccttccttattcatcctatttccttctggcggtcacgctcacccattctccctggtatgtgatttccaccacttccagctccggacagcgcccaaaggcctccttcaccgcctcttccttcatatcaataatgccggaggtgatgaagataccgccttttttcagatgggccggtatctcatccaccagcagaataataacatccgccagtatgttggccactgccacatcgtacttaccgtatcccgcccattccttgacggaaacatcgtctatgatattaccctggagtacatggaacctgtcttcaggaatgctgttggcttccaggttctcccttacggcgttgatggcattttcatccaggtccgtgccccacacctcttttgcccccagtttcagggctgtgattcccaggataccgctgcctgttcccacatccagcaccaaggtgtcccggttcacgtacttttccagctggcggatgcacagctgggtggtctcatgcatgcctgttccaaaggccgttcccgggtcaatctgcaccagaagcttgtccttgtgctcctccggtatggtttcccaggtaggcttaatcagaatatcgtccactgtaaagggcttaaagtattgtttccagttgttaatccagtccttgtcctctgtctccgacgcggtgatggtcctggcgcccagatccgcaaatggggacagctcgtctaggccctcttccacccgtctgaggtaatccgccacatccgcgtcatcatccaggtaaaaacttatcctggcaacaccttcgtccggaggaagctcaggaagaatgtcaataaacatcccctttgtctccttctctgtcaggggcacattgtcttcgatttcgattccttctataccaatgtcatcaaacatgctgctaatcaggtctacagcctgtgttgtggtagttaatgtaaattttttccatttcatgtgattctctcctatttcctatgtgctgtttacgggctgcttatgtgttgcttattattttaatgaacaataccccaagcaccgccagtaccacgggacggaccaccttctggccgtcgtgggccaccatgcctgccccgatgtagtgtcccgcaatggaacacacgcctgctgtaagccccagcgggtagtaaacatttccggtggcaataaaggtcaccagggccgctatattagaggaaagattgattacctttgtctgggcggaggcgctgcgggcgtccatcccggcagcccctgtgagaatcagaatcaggaaggttcctgttccgggtccgtaaaagccgtcatatccccccacaaaaaaggccgccgccatggagatggcaaataccttatttctggaaatatcttccgtcctgtccctggctcccatatccttgttcctgagcacgtaaaacgccacaacgggcagcaccacaatcatcatgtgcttgatgacggattccggcaccatgagggccagatgggcgcccagagccgaacccataagggcggccgccgaggagcacaccgccataagcacctttcctttgagaaaaccgtgctttgccagccgggccgtggaaacagtggtgcccatggctgagctgagtttattggtacccagggccacatgggcgggcacccctgcaatgagatatgcgggcagagcaataagcccgccgccgcctgcaatggaatccaccagtccggccaggaacaccaacgggcacacaattagatattgtaacatgattgtatcctcttttctgtaaaacaacctttatattatcacatattatgaacactggcaataagcggcaatttttttttgcaataaaaaagccccgccctgcattaacattatgaacggatgaaagaaagatgccggggcaggaacggtcagccgcgaaagccccaggggacagggattccggaacatacaatcataaacctaaagggcggcaaaaagccgcacgaaattccaatattgcattacactccatcacacacacataccggatggaacggctcccaggcattgaaccaaaatacaaaagaaacggattaccatacagttaccatataaataaggatacaaaagaaaaaattgcttctggtcttaaagttaccatacgacaaaaacagaaaaccccggcgcctgcttgccacaggcgccggggttttctgtttttcacaggggattatgcaggcttacagatctcttcccgcagcgcttttgccatctcctgatattcctcctccgagagaagcactttctccacatcatcatggaacgcctctccccactgaagtccgcccttgtatttgggaaccacgtgtacatgtacatggggcacgccgtccccaaaagtggcataattgattttatcaggatgatacaggttccagacagcctgggctgtctttgccagctctgcaaaatatcccctgttttcctcttcggtcagctggaaatactctgtcttgtggtccttaaacatcacaatgcatcttcccttatgcttctggtcacggttcaggtacaccgtggaatagtccagtttgcacacctcaatcatcaggctgtttaatttctctccattttcacagtaaaaacaatcgttcatttttatttatcctccattttattgtgtcaatcccatacctgtttcataacaaatatccgctacttcaccagtcccagcatggacggaatccacatggacatggccggcacataggttaccagcagaagcaccactgcaatggccgcaaaaaagggaagcagtgtcttaattacgccctcaatggatattcccaccaccttgcaccccgtaaacagaatcaccccaaccggcggtgtaatggtgccgatacacaggttaaatacaatcatgatgccgaactgcaccgggtccatgccaaagctctggcagatgggcaggaaaataggcgtaaaaatcagcacggccggcgtcgggtccataaaggttcccaccaccaggagaatcacgttcatcagcagcagaatcacatacttattgctgctgagggacagcatggcgttggcaatggcagtgggaatcatggtataggccatgacccatgacatgatggatgacacgccaatcataaaaataacaatacaggtggtcttgcaggaactcaatataatggacggcaggtcttttattttcagggagcggtagcaaaggcttaaaatcagggcataaaccaccgcgatggcagaaccttccgtggcagtaaacacgcctttcagaataccgccgattacaatgataattaagagcaggctgggcagggcatcccacagcaccttgagcgcttctttgggagtcacggaaaaggttgacacgtaccccctcttttttgccatgtatcccgcaataaacatcagggaaataccccaggcaatgcccggtatgtaacctgccatgaacagggctgccacggatacgcttcccgccacagtggcgtacacaatcagcgtgttgcttggcggaatcagctgtccggtgggggctgacgcaatattgaccgcagccacataatccttgtcatatccttcttccagttcaataggagccatggtgccgccgatggctgcggctgcggctgttccgcttccgctgatggcgccgaacagcatattggccacaatattggtctgagccagggaaccgggcaggcgtccgctgataagccttgcacagttaaccagccgtatggcaatgccgccgttgttcataatgttgccggccaggataaagaaggggatggccagcagtgaaaatgagtttacaccggtaaacatcttctgggcgcaggtcacgatgcccggaccaaagggaagtatggtaatcatggccagcgccgacgacataccgatactgatgccgatgggcacgcccattaccagcatgacaaccaccgaaataatcattataattcctgctataacagcaacatccattacgcttcctccttactgcacgccgtgtttttaaattccttcataagtgccgtgacattgtagaaaaaataaaacacaatgctgattccgctgagcgggatggctccgtaaataattcccatggatacctggagggcggaatccatctggcccatctggcgcactgcgcccatatagcctccggctgccatcactcccagtccgaacagggcaatgatgatttctcctgcaatgtcgcacacgattcttccccggggcggaagcttgtcctttacaaagggaatgttcatatgctcccttaatccaaacacataggcagcgcacaaaagcaccatccacacaaacatataccttgccagcacctcgctgacagcactgggcttattgaaaatatagcgggtaatcacctgataagtgaccagaatggtcatcaccgacataagggcgatacagctcacttccaggacccggtcaaacagtttcttcatcttttccatgtcatatcctcctgttatatcctcatctatctggccagcgcccgaatcccgtcgtacagttccttcccaaagacagaaccgctggtggcctcctcatgaagctttttgcagttttcctggaacggtttgatatccacatccacaaaggtgactccatgttccctggcagattccttggccgtctcaatctgttcattccagagattaaactcatcctccacagagtcttccaggatctgcgtcagaagctcccgatcctccggcttcatgcgctccagatatgcgctttccgcaatcaccaggtcgggtatcatcacatgctgggttttggaaaatacaggagcaacctcataatgcttcaggtccacatatgtaatctcattgttctcgccgccgtccagaaccccctgctgaatggctgtgtacacctcgccctgactcatgggggttcccacaccacccatgtatttcatcattgcaaccatggtaggcgattccataacacgtatcttcatgccgtccaggtctttcggcgtctcaatgggtttgccggtatacacattcctggatccagcggtgtaggccgccatgacctcaaagccctcttccttggtggactcaaacagcggatccaggatgccggaggtaaatacttccttctggtgttcctgggaatcaaatatataaggaagtcccaggattgaaaaatccttgttataattctccaccatggcgttattgacaatggccatctggattgccccgttttgtatcagctccagggtggctctctggtcccccagcacctcattgggataaatcaaaaactcatatctcccaccggtggcctccttaaacctctcccctgcgcgttccagcgcctggtaatgaggatgggtgggcgcctgattgtaagcgattcttatgattcccccgtccagctgtccgctgctcttggagcatccgctacaggccagtcccatggccagcaaacccatggccagcagatatctctttctcatgaaatattcctcctgtcagttgttttgatacaacttgttgtatgttttacttttatactatcccctcttgcctcaaataatagcacatgttgtatgtttttacaagggttttttcagattttttatagaaaatgtattgtttccttaataatgtaaattgctttcatactaccagttgtagttttatttgctttttttcgcaatttactattgacttttctcatttgcaggtttattattaaggcataatcaaatacaacatgttgtattattatcccataacatttttacattcattacctacatgtatcttttaaccatgtaaacaacaaaacatacagaaggaggattcatattatgtttgaaatcgtgaacaatcgtcaggtcatttttggagaaaacaaaatcagtgaaattcccggacttttaaaatggtacgggtgcaggaaggtattttttgccgcctacagcagcagcgcggacagttacataaggatagcccgggcattgactgaagcgggcattgagcatgtatgctatgacaaggtagcaggagagccggacctgcacatgattaacggaggcagggacattttcctggaccagcactgtgactgcaccctggctcttggaggcggcagcgttattgacacggccaaggccatcggcatgctggccgtgaacggcggcaatgtggaggattaccagatgaacggaaagcaggtaaccgctgttcctcccctgttcatcgctgttcccaccacctccggcacaggagccgaggcaactaagacaagcgttgtgctcaacaactacaacggtctgaaaaagagcctttaccacaccaccatgattgcggacattgtaatcctggatccctccctcaccacaggtcttccggcaaagataacggccgcaaccggcatggatgccctgagccacgccattgaatcctacgtttccctcaatgccagccccctgaccgagatgtacggcctgaaggcaatcgagcttatcaaccaaagcctgaaagatgcatgccagaatcccggggacctggaagcaaggggcaatatgatgctgggcagctatctgggagggcttgccataactgccggaatcggcattgcccatatcatggcgcagcccctgggcgcaatgtacaaaatccctcacggcgatgcctgctccatcttccttcccggctccatggaactgaacctggattacgccgagtccagatacgccaatgtggcaaaggccctgggcgtttccaaagcaggctgtacggaccgcgaaaacgccctgaacgccatccgccgcgtcagggaaatacgcagggaaatcaacgcccctgtttccctggctccctacatcacagaaactcctgatatggatttcatcattgagacagtgaaaaagaccacaggccatattacctgcaacccctgccctctgacggagcagctcatgagagatgcctttgaaaaggccatggctgaataaccggcagacagcaggttccggcttacggcaggctacggcttatggcaggttccggcttgtgatttcatgggttccgtgataatataaaaaatacaacatgaggtatgtaaaagaacggaggaaccattgtgagccagaaaacaagccagaaagaaagcaagacttttttatataaaaaggtgtatcaggatttaaaagacagaatacagaacggtgagtatttaagggacgccctgcttccctcggaacgcgagattggagagacataccaggtggaccggacaacggtccgcaaggcgctccagcttttggtggatgacgggctggttgaaaagaggcccggtaaggggaccgtggtggtgtggaggccggaccaggaacagactcagtctcgtcccgtgctgcgcccggagcggaggaacggccccattgccttccttcttccaagaggggataacaacagttcccgcattacccagcccttttattcccagctgttctaccgtgcggaaaaggaatgccagaagctggggtataccctggtttactccaccctggacgagacggatcatttcgacgaactggtgcaggccaatggattttccggcatcttctttgtaagcaacatgtcccaccgccatctggaccgggccctggagttaaggattccttccatactgataaacagttactatgagcgcatgccgtccattctgtccgacaacttcagcgggacctacaccgcatgccggtatctcattgaacggggacacaaatccatcggcatcatcaacggcaacagccgctacaccaccaacaacgagcgctggcggggctgcgtgacagccctgcgggaggccgggctatccttaaaaaatgaattctgcctgggcggcacttcctgggaatttgaggcagggctggctgccgtggagcagatgctggccaaaaacaccgtctatcccactgccctggtggcctttaacgaccgtctggccctgggggccatccaggccatccaccaggccggcctcagggttccggatgacatcagcgtcatcggatacgacaactcggaccaggcaaaatactccatgcccaagattaccaccgtggaaatccatgcgccccttatggcccagacagcgtccagactgctgtttcagcagattgacgactatgaggtgctgaccgtcaaggtactgacccctgtggaactgatcgagcaggacagtgtccggcccctggaatagctaccggaccaaagccccgtccgctcccaccacatagccgtccggggttgtggtattcacaaacagccgtcccatggtaccgtcggactgggtattgaaataataaagctgcccgtctatcatctgccagcccgtgcgcatcatgcccagggtgccgtcatccagaggattcagataataccggtttccgtctctgtccgtgaaccatcccgtcagcatatatccgttctggtcaaagcggtaccagcggttatgtatcagctgccagcccccggacagccagctgccgccgcagagctggaaccaccagccccccggactgtatctccagccctggccgtactggaccccgggccctccattgtaataccaccagtcgtcatcatcccagtcgtcccagtcatcccagtcatcatcattgggatcccaccagtatccgggatcaaactgggccgtggacgtatccggcacattggtattaaagccggggtaagccctgaccgtattatctgtggtaacctgggcattgccctgaggcgctgatgggccgccgtaatcataggtccctgacggcgcagtcccataatcatactccacaccggggccgcccctgcggtaatggtcataataccagctgtctcccggcccataggccaggcagtcctgtaccggcaggaaagacagagctgcggcagccgccagtataagcggcacagaaatcatccttctcatgtttttctcctctttttcttaggtctgtattacatttcccattacattctcaaatacattctcaactaccttcttacgcatatctaaaagtatatcacaacacaattgacattttcaacacatgagcatacaatagttgtatgtgcaattgttgcgaatgcatttatttgacttatgtaacttatgttacagttcaatgaaggaggattccggaatgaaggaatttttatcttatctgaagccttacaaaagggacgcggtgctggctgttttctgtattgaagccgagaccgtgtttgagttaatcatcccgctggtcatggcttccattgtggatgtgggcgtagccaccggggaccgccattatatcctgatgaaggggctgcagatggttctctttgcccttatctcccttgtgctgggccagggctccgccatgttctcggcccgttgcggccagggactgggggccgaaatccgcaaggcggagtttgcaaagctgcagcagttttcctttgccaacacagaccatttcagcagttcttccctggtgacccgccttaccagcgacgttaccaccatacaaaactctgttgccacaggcatgcggcccgctttccgctcaccggtcatgatgctcaccgccatggccgcttccttttacatcaatccgcagctggcactggtgtttctggtggctgcccctgttctgggtgtgctgctgtttttcatcatcagccatgtgcgccccctgtacagtgtgatgcagggcgccatcgacatggtaaaccgcatcattcaggaaaacctgaccgccatccgtgtggtgaaatcctatgtccggggcgattatgaaatccagaaattcgaggaggtcaattacaatctgcagttcacagcggaaaaagccttccgcctggcagtcctcaatatgccggccatgcagttagtcatgtactccaccatcctgtgcatcctgtggttcggaggcaggctggtcaccataggtggcgtgaaggtgggcgagctcaccggtttcctgagctatgtgatgcaggttttaaattccctgatgatgttctccaatgtgttccttatgaccaccagggccctggcttcctggaagcgtatctcgcaggtcatggatgaggaaatcgacatcagggaggatgcgtccagcaccctggaagtaaagcacggtgatatccggtttgagaatgtgtactttaaatacaatcaggaggctgccgaatatgtgctctcagacatttccttccatataaagccgggacagaccgtgggcatcatcggccagacaggcgctgccaagagtacgctggtgcagctgattcccaggctctatgatgtcaccaagggcactgtttatatagacggccgcccggtccgggaatactcccttaaaggactgagggattccatcgccatggtgctccagaaaaacaccctgttttccgggacagtaaaggataacctgcgctggggcagggaaacagccacggagcaggaaatcgaggaggcctgccgcattgcctgcgtggatgaattcatcgaccgcctggagcggggatatgaaacagagctgggccagggaggcgtcaatgtgtcgggcggacagaagcagagactctgcattgccagggccatcctaaagtctcccagggtgctgattctggatgattccaccagcgccgtggatacggccacagaggccaaaatccgggacggactggcaaagagcatgccggatacaactaaaatcatcattgcccagcgcatatcctccgttgcccacgcagaccaaatcatcatactggaggacggacgggtgaacgcggtcggcagccacgaaaccttgctggcttccaaccagatttatcaggacatctatcattctcagcaggaaggggcgaatctgtaatggcaagaatagcaaattataaccgtcccaaggataccggacggaccttaaagcagatgttcggctacctgggccggcacaagtggtatatgctggtcatcgccctcctggtggcagtcagcgccctgtccagcatttcaggaacatacatgttaaaaccagtcatcaaccgtttcattctcccgggtgacataccggggcttgtaaacatgctgctggtcatgggagggctgtacctgtgcggcgcactctcctgttatgcctacaatcagatgatggtccatatttcccagaaggtggtgagcgaaatccgctccgacctgttccggcacacccagcgccttcccctgacctactttgacgcccatacccacggggagctgatgagccgttttaccaacgatgtggataccatcagcgaagcccttaacaacagctctgccatgatgatacagagcttcataaccataacagggaccatcaccatgctgctggtgctggactggcgtctttccctcattgtcatggtttttctgcttctcatggttttgttcatccgttataatggaaaaaggagcaggaagtattttatccagcagcagaagtacctgggaagcatcaacggctttgtggaggagatggtggccggacagaaggtggaaaaggtgtttaaccatgaggcgcaggactacgaggaattctgccgccgcaacgaggcgttccggacagcggccaccagggccctgacctattccggcatgacggttcccaccattgtggccctgtcttatgtaaactatgccctgtcagcctgtgtgggcggcctgttcgtcctgtcagggttaacggatttggggaccctggcgtcctatctggtgtatgtgcgccagagcgccatgcccatgaaccagtttacccagcagattaactttcttttggctgccctgtccggagccgaacgtatttttgatatgatgaacgagatccaggaactggacgaaggcactgtgacgctgtgtaatgtgcgcaggaacgaccagggcggctgggaagaatgcagggaattcacccactgtttcgcctggaaggtgccgcacgaaggtccggctgatatggcagagccccataccggctcccagtccggcttccgtctcattccccttaagggggatgtgcgtttcgaccaggttgtgttcggatacacgccggagaaaaccattctgaacggcatcagcctttatgcgaaaccggggcagaaaatcgcgtttgtgggttccaccggcgccggaaagaccaccatcatcaatctggtaaaccgtttctacgaaatacagcagggaaccataacctatgacggcattgacataagaaccattaaaaaggacgatttgcgccgttccctctccatggtaatccaggatacccacctgttcaccggaaccatagcggacaatatacgttacggacggctggatgccacagacgaagacgtggtaaccgcggccaaggtagccaatgcccactcctttatccggcggctgccccagggatatgacacgccccttcacagcgacggcgccaacctgtcccagggccagcgccagctcctggccattgcaagggcagccatctcccgcccgcctgtgctgattctggatgaggccaccagctccattgacacccggacggaaaaactcattgaaaagggtatggatgcgctgatggacgggcgcactgtcttcgtcatcgcccacaggctgtccacggtccgcaactccaaggccattatggtgctggaaaagggagaaatcatagagcgcggtagccacgaagaactgattgaccagagaggacggtattataaactgtacacaggccagtttgaactggaatagagaaaggaaacatgaaccatgatgaaacaagagcaagtgcgccgccttctggtgagggcggaaagggcaaggaaacatctgatgcagccccatttcacccggatcggccttaccttcggccagggccacgcccgcatcctggatgtactgctggcccgggaccatatcacccagaaagaactgtcagatctctgccatatggatgtaaccaccatgtcccgctccctggaccgtctggaggaatccggctacctggtaagggaaaaggatccgggatgccgcagatcctatctgatatgcctcaccggcgatggtgccgcagaggcccgcagggtacgcaaggtgctggagatggtggatgaggttatatggaacgggctggatcaggatgagatggaagcattctgcggcactatggaaaaaatatgcagaaacctggaggaatgcgattttaaatttgatgagcaggaaacgtaagggaaaaccgcccggtcagaatagaactattccggcagggcggttttcctgtttatatgtttattttattcataccatttcatccgtctgccggttccatctactgctggttcagatatgtacggatattatccagcacctttttgctgagcaaatcaaaggcctgctttgttcttccggcagagatatgggcgcagaatacgcccggatggcgaatcagttcgccggtgctgtctcccagcgcgccctctgtatcacagataaaataattatttccctgatccagccatgttttcagggcaggaaggtcgaatgcaggtccgatggaggtattgaacaggatttttccctgtcccagctgtgtgaattcttcctcatgaagcagaatcacattcttattcagacaggcaaagaccacctcgctgcgggccagcagttcctttaaaggcctgtaaaccagcccctggtcttccctgtcctgcttcctggaacggctgtaataggacacatccgctcccatgaatttcatggcatccgctatcattcctcccgacacgcccattccgatgatacccacctttaaatccgtgatttcaaccggcatatcccgaaacatgggccggtcgaagccgtgaaggaaacgcaccagctcgcagagcacgtattccaccactcccctgtctccgtaatccctgattccaagcactgtaatgccccgttccctggcgcaggcaatgtccacattggcgctttcctccgaatagaggctgcagcacatgccaatgtaccggatagagggacagctctcaattacatagcggctgattctggatgtgtagcttaccagcactgcgtccgcatccccgatgcgccggatgatttcctcatcaccggacggaacatcttcatacaatgttatctcccctgcatacccgcgcagctcctcctctgcctgtgaaaccaggttcacaggctctattgccactaattttttaaacatgtccatttcctcctaaaatacaatgggtgatacaatattctgcaaaaccgccaccacgctccagccggcaatggcgctggtactggagtaaatatccacaacagccttcacgccttctatctcggatgtaatcttatggtcatccccaaccatgcccggaacgctgtatatatccacacgggtatcctccggacccacggtcgcaagggatgaggccacagccacattcaccttggtgggaaggagtgaaatggcttcctttgcattaccatggaatacgtggctctcctgtgtgtcctccatcaggcgctcttcaaaaagcggggttcccttcaaggatgccggtcccttttttgtcctgatgcctgcctctgcctgtcccataagggatatggtccgcagcacatcaaaacctcccactgcaccggatgcaatgtacaccctggttccatggacggcagctgtttcctttacctgtccataaaattccttatctgcaaacgctccgatggacagcacaatcatactggcaccggatgccagaatcttcactccgcagtccttgaccgactggaccgaagctgcctccgcaacatagtcaggggccagcgccagaagctcgtctatggtgctgcatgcccggcacccgcctttttttgccagaagctctgtcttttccctggttctgcccaaaactcccaccagctcatattcatccagcattcccttcaggccggcttccactataatatcggccagatagccattgcccaggattccaagttttaattttcccattgtaacctcctaaaacgagggctgaacgctcaataaaagccttcagccctccatgtctctttttttatggcttagtttgtatagttgtcaaaatatccctgaaccaggataaccggtgttcccttatcgccggaaccgctggtaaggtcgcacagagagcctataaggtcggtaagccttctgggcgtggttccctgggatgccatgtcgcccaccagatcggatttcttttccttgattctctgggaaactgcattctttaaggcttctccggacagatccttaaaatcattgtcagccagatattttaattttacttcgtttggcgtgccttccagtccctctgtattggcaacagataccaccgggtcagccaactcccagattttcccaaccggatccttgaacgcgccgtcgccgtataccataacttccacatgctttcctgtgcggtccaggacttttttctggatatcgttcaccaaatccatacaatcccgcgggaacagcttaatggtgtcctcggttgacttgttggagcccagaaggccgtatttttcattgcagccgcttccgtccaccggggcattcaggatatcatccatgccgcataccacctcggctcctgcctcctttaagatgcgcttggtgcgcatacgtgaatggatgtcacaggtcagcaccttcctggtatgatttaagatttctctgggattatttgcaaataccacctgggcctctgcgccctgctcttcaatcagctggcagtaataggacacatagtccactccggtaaacgggtgcttattctccccgaacagttccctgtagcgcttcaaatccagcacatcgctgtaagggttgatgccggcctcgtctacctggtctaaggataccagggaattccccacctcgtcgctgggataactgagcatcagcaccaccttctttgctcctctggcaattccctttaagcagatggaaaaacggtttctggacagaatcgggaaaatgaccccgatggtctctccgcccagctttgccctcacgtcctctgcaatggcatcaatggaagcataattgccctgagccctggcaaccacggactctgtcacggaaatgacatctttgtccctgatctcaaagccttcgctttccgctgcgtccaaaacgctgtccaccacgatttcagcaagattgtccccttcacggataatcgggcagcggattcctctcgagattgttcctacttttctttccatatgtatcttctcctaatatattataattttcgtcatactattttattatagtataaaatacgggattgtggaagtatttattttcgcggaaaccatacgcgggaaccataaacctgcagggacgccgcgggaaccataaacagcagcccggtatcactttccttcggtgacatgggctgctgttttttccggatattttttacattcccggctctggttttaagattttcgtttccctgattttggttgggatggctttgacacagattgctttggctggggcggttccggaagctgaccgcaggtatccaggaccagggcggtcagaaactctctgtcatccagctcctccaccagatacattcccggacggccgccatgaggcgccaccggttctgcttccgggagatgcttatgtcctgcttctgtcacctttatataaaactggttgttctctaccgttccaaagaacgttcccccgcaccacaggccatactcgccaaataattttttataggaaatggcacctgcgccgcttaactgcgcagctacatactgaacatattccaggctggaagccatattgggtcctccttgtttgatatgtaatctgtcaatccagggaccggagtacttccagcatcttttttaagcctgccgcgttttcctccggcgtcctggcggggtcctgctggtcataccggctgcacgggagttcactgcatctgccgcagtggggcagtttcttttcctccacgcagcaccggtatatactgcaccgctcctcccctgtgtattccagccagaatggttttccctgtatctttgggcaccccccgcattccttttggtaataaggacattcattgcagatacatccgcagcatgccacaatattctccatcatccttcctccttgctatgagcacttagatgctgtgtttcagcactttacacacggcgtacgtcatgttttatgaactcattttaccgcaggaaacaggacatctgtttgtcatgtttacagactgctctggtatctatctgtaaatttcatagacacggcgtcccagctctgcaagctccccgcggaattcgcagggctccaaaagctcaatctggtctcccaggctcagtatccagcagaacaggttttccttgtccgagtatccggctgtaaacataaaatcaccgtccggcagttcctccagagtctccgggccaaattcatctacaatcctccatttaatggaaggcttgcaccgggcttttaccagaaaacggatggggaaaggacggtccgcctcattttcataaggcggcaggatacgtttatcaaagacctcctggcagcattccaaatccaccatacggttcagcttaaacagccggtaatcctggcgcatcaggcagaatccccacacataccaggaggaccactggaataccagcagatacggctctattgtacggctggtttcccccatgggcgaatagtaagtaaaacgtatgtgacgccgtgtttctgcggcctcctgaatcaggtgtattttaggcgccagtgactgccggtaccaggacgagagattaatgagaatactgctgtcactgcttatcaaatcctgctttccaagggccagcttgtccatcagcagacggtatctggctgaccctgatacgctgtcaaggcttctgaggcctgccaggattgcatccatttccccggacgtaatcagggtacggtccattctgtatccctccataatggaaatccctccaccgggtccccggctggtaacaagagggattccggccttgcagatatcctctatatcccggttgatggtcctccgggacacctcgaatttttccgccagatagggggcggttaccttttcccgctggagcaggatagacaggataccgatgagacggtctattttcatggatggcaaccctcactttcttggtttttaaaaacacagaggcagtgttacctgcccctgtgcttttctttctttttttgctgtttcagttcaaactggcgtctggcctccgcttcctttttctctctgctgaccgccttcctgcctgtctttatctgctcatgctgcaatttcagggcctgctgggatttggtacccatgcctgactcccgaagctcctctctgacctggcgcttcacgcgctttgggtttttaagatgctcacttacagcagctgccacagccggactaaaccgcagaccatagtattcctttgccaggaatccgtgtacctcgcaatcctttggctccgggccaaaggtaatcttgcacacagtcatccttccgctttccacccgctccagtattccaatccagaatgggtcctcgaaaaatactctcagtactaccgatactttgtccatgacaattcctcctttgaaatgtgatgaacaaagaatggacgacccaaggagggagggttactgacatccctgtctccccgccagttaaagcaggactataggaatgcggctggactacctaccagctctgcaggtttttatcctgcgttgtgtttttatctttgctttttgattttaccatacaactgcatacttttctattctttattggcatcacaccaataatgcagtcataaccgaatgttccatatcgtcaatattataaacatgctccatcacttcaaaggtttcccgtagattccctctggcacttttccagccaatgccatctgtaaaccacacaaaggaaaatccttcgattgtgtccgcctcctgggaaagcattttatagcttctggcggtttcattcagcttcgagcccccgctgctgtaaaaattcgtttcaaccgcataaatcatggactctgtttttaccacgaagtcaaaccgctttgcagccttgccctcgttggataaagcggacaaatcaatatcccatttattctcaatatccttcaggtacatttctttaaaataattctcatccttcgtaaatcctgcggcaatgatatattgctccaccagatcttccatctggtgcccgccccggttcttacggccattggagtcaagtcctgtctcaatccccagcgcatagtcaaccagattgtttaccagatgcttctgcagcaggtcaaacaatcctgtttttctcatgaatatcttatattgctccatatcataattcattgttttaaaattatacttaaatgcgccgttctcatcctgggcatagatttcgttgctccgcacagccagaagcagtggaatacaggacagggtttccggatattttgttattattttttcaaaatcatcttctatattcacagaacctatcagtgaatttagtatgtttaactcgatttttatatcctccacattgcggactaccttgtcaaaatctatgtaataccggtaccctgaaatacttgcccggaatttactaagccatgcgtcaaaatctctttttaccactccagcgcctcctgtatctgatccaaacgtcttttcgctatatccagatattcttcgttattgtcaattccgataaactgccttccgtactttccggacactaccccggttgttccggaaccgcaaaacggatccagtaccacgtcccccttttttgtggacgccaaaataatccgttccagtaaatactccggtttttgcgtgggatgcctgccggcccacttttccgacggtctggtgaggcttccctcccacacatccttcatctgtttcccgccgttcatttgcttcatctgctcatagttaaacatgtgcctggccttcttttcatccttcctagcccacagaatcgtctctgtggaatgggtgaagcagcggcaggccaaattgggcggcgggtttgttttcttccaggtaatattattgattatcttataccgctcctgctgaagcgccattccgattgaataaatattgtgcagggtaccggatatccatatggttccgccgggcttcagcacccttctgcacatgcggatccacctgcggttgaaagcatggttttccttaaaatccccgccctcatcccaggacgccttattgactgataccattcttcccccttggcaggttatgccgttattgctcagaaaatatggcggatctgcaaatatcatatcaacactttccggcttcattttccgcagcagctcaagacagtctcccagataaagcctttttgtatcagtcccataatatgcctggatttttccccgcatcagctcttccatagatatacctctaataattcgtaatgatgatctcctgacccacccggttctttgcgtcagaatttatcatacgctttacatccaccaccactttgttgaaatctgcatataactgattgataaaatctgtgttgtgattggtcagcatacagtagcatccccgttctgtaagccctctgaacacgtcagccagacgtctgtggctttcaatgtcaaagccctcctttgtgtaagactcaaaagacgttggattcaagggggcgtagggactgtctataaaaacaaaatcacccttctctgccaaatcacaggcattctgaaaatcgcctttcataatcttcaccttctgaaggctttgtgatacagccatgatactttctttgctgcatgattcccttacactgttattatacggtacattaaacaggcctcttccgtttactctgtaaagaccgttaaagcagtgtttgttgaggaacacgaataaaacagctaattccatatcgtattccgcccgcatcattttatcattatagttttcccggactttataataatactcttttcctccatctgctattcttttatcatactctgaaatagcatcggcaaattcttctggtgaaatttttatctgcaggtaggcattgatcaatgattcatttatatcattaataatggatttttccggctgcaaatcaaaatatactgcaccgccgcccacaaatggttccatatatccattaaaatgttttggcagtctcgcttttatctgttcaagtaattgtcttttgccgcccgcccatttcacaaatggctgtgcactgatttccgtcatcgtgtttcctttcacccataaaatcataacatttatgattcattataagtgaaagttaaataaaacacaacctgcaactgccttctttcggaaaacaaaaatacccgggcaaaaatgcaccggagaatatttccctgaatttagcaaatactattttatgtcagattaaatccaaccgattgaaggataaaaggagaaagagattatgaacaaaaatatgcgtacatgggtcatcggaatctgcgtggccctggtcatcatcgtggccgtggcggctgcgtttgccaacaaccgcagcggctctgatgccggacagacctctgaaagccagacagaaagcgcctctgcgtccgcggcgtcacagacggaaacagaaacaggttccggggaacaggcatcctcaaattccggcaatgctgccgaccacagcggacataacggacatatgaacgcttcgggagacgacctgagccgttacctgaccgaacaggattctatcatgatgaatatgatggaggatatggtcatccgcgaaaaatcaggaaatgcttccctggactttctaaggggcatgattccccaccacgaggcagctatcaagatgtctgagagctatctgaactaccaaggaaaaagcgatgagctaaaaaccattgcccaggatatcataaccgcccagaaggatgagctaaaacagatgaacgagctggttaaaacgtatgaaacggacggaaaaaaggatcagacaaaggaggacgcttatctggagcagtacagcaaaatgtttgccgatgactccatgtcccaccacatggatacctcagatgttgacagtctggaccaggcctttgcagagggcatgattatgcatcatcagatggctgtggatatggccagggatatcctggagtatacagactatgaagagatacgcaccatggcccagaatattatagatgtgcaggagaaggaaattgcccagatggaaaagatcctgaacgatcagcaggaatcccagccggaataaaccggaataaaacatcgtaaacaggattctccaattgacacccgccctcccccatgctataatctccccataaaaatcccacccatccgcagtccggacacaggctggatttttgccgccgggtaaaaatatcagcgtcaggctttctatcgtcaggcccaggagcaatacgaatcaggaatcccattcctcatccgctccagaagatagaaggtactggcgctttttgtgtttcggaggatgccggaaggtatgggaaccgttcaggaggtcaccatgcagaacaactatgcagaacaaacatcgtgcttaaaagaatttgccagatacacctcgttaaacgtactgggaatgattggtctttcctgctatatactggcagacaccttctttgtcgccaaaggtctgggaaccagcggtcttgcagccctgaacctggccatccccgtctacagctttatccacggtaccggactcatgttcggaatcggcggcgccaccaaattctccatcagccgcaaatcagggctatcggatctgatttttacaaacaccctgtttttcgccggatttacggcccttttgttcttcctggccggactgttcctgtccccgcagattacagcgcttctgggcgctgacagccaggtggccgcaatgacccagacctacctgaaaatgatactgctctttgccccggcctttattctcaatgatatcctggtctgtttcgtgaggaatgacggaaatcccaggctttccatgcttgccatgctgggaggaagcatggccaatatcctgttggactatgtctttatttttcctctgggcatgggcatattcggcgccgtactggctaccgggctggcgccccttatcagtatagccatcatgtccggccactggatgggtaagaacaagggattccatctcgccaaaacagaaatccagggacagacagccctccttatcctctccctgggattcccctccctgatcacggaagtatcctctggtattgtcatcatcgtgttcaatgtgattatccttggactaaagggaaatgtgggggtggccgcctacggcgtcatagccaacctgtccctggtggtcatatccattttcaccggcattgcccagggaatgcagccgttaatcagcagcgcttacggccggggtgattccgccagaatcaggggaatactgcggtacggactggccgccgcggttttcatctccctgacactgtatgccggaatttgttggggagcagctcccataacagccgtattcaacagcgagaacaaccataagctgcaggaaatagcagagtatgggctaaggctgtattttacaggcataccggctgcggggctcaatatcatcctgtccatctttttcacctccacggagcaggctgtgccggcccacatcatttccctgttaaggggcctggtgctcatcattcccatagcgtttttcctgtccggcctttggggaatgaccggtgtctggctggcctttcctgcgacggagctggtttgtgcgctgacaggcgctgccatctgtaagcgcttctactcccaatccttctccgcttccaggtaataatgcagcagcctgggctccgacagcgtgttggccgtcagcctgtccctgcgtggcttctcatcctccgcaaataaaaacagtcccctaaggccggactgatttaagaattttccctctgcctgaagctccaggccgtccacagacaccttatccttggaagccagctggaatccccagtcgccgaaagagggcacctgtacatggtagggatatacatatggaaattcctgtcccacagttttattgatgcaccaataggcatctgctgcatagtaaggactggtggactggaccgacataaccccatgttccgtgagattattgctgcacagccggtagaacaggtccgtgtacagcttgttcagcgactcgctgttgggatcagggagatctgtgatgattacatcgaattccccatcatatccctccccgccctcattgcggtaattgttttccaggtacccgtaggcgtcctcactgcggatttccagcttgggactgtcaagagaaccctggttcagggcagctatgtcctgattggttctgcacaagtccacaaccctggcatccaggtccaccagcacgatcttctccacctccggatattttaatatctcccttacagccaggccgtcccctcctcccagcaccaggacattcctgcggcttttggccgctgacatgggtatatgcaccagggcctcatggtacctgtactcgtccttggaggaaaactggatatttccattgataaacaggcggatatcgtccttatgtttggtgaccaccagcttctggtacggcgtctgttcccgcaggattaccttgtccctgtaaagcccctgttcaattcctgatgccacattttccgaaaacagcattcccagcaccatgaatacacacgccagtccgctcaccagtctccacatggaaaacattctgatatatccgcggtaggatacaagaataaacagggatatgcccaggttcagactgcccaccagaaaggcagtggaaaaatatcccagctgaggcagcaggagcagcggaaacgcaatggatcccgccagtccgccgatataatcaaagctgaaaatactggaaagggtaatgcgcagattgcccgcattttcctcaatgattcttgtgagaagggggatctccaggcctaccagcattccaatcagtatgatttccagatacatcacaagctggtaggactgcacatagatgtttgccaaaaacaaaagcagggagctggtccctcccagtatgcccacgccgatttccacaaagacaaaccagtcaaacagctctgtcctcacatatttggaaaggtaggaccccattcccatggcgcacatataaaggccgatggtgatggaaaactgggctatgctgtcccccagcagataggagctgacggagctgattaaaagttcgtatatgatggagcagccggatatgatgaaggtggtgaacatcagccggcggtaagaaaatgtcccttccttcatcacataatcactccgcttataatgatggacagcccaataaacattcctgcaaccataatgccggcagccgggttcccgccgctgatttccttattgagatcatatttccggttaatcaggttcagcgccaggtagcccagaacgcaaaacaccagccctaccacatagtaatatatggttgaggcaataccggtcagcagtgattcgtgaaccgctgtgccggaaggggacataacagctgcccggataatgattccgattccaacggagatacccgccataacgcttcccaccgccacattccccttcttgatttccgccgggaactcacagggaatcaccaaatccaccacaaatgtaccaaagagcataagggccgtgcccaaaacgcaataaaccataattgtaataaattctgccataatcttctcctttttgatttggttttgtccgaatacatactgccggtttactttcttgcctttttcgcctttttcgcctatttgccggagctgattccgcctccggatgagcgcctggaattgatgctgctctggcggacgctgtctgaatagcttttgtaaggatcgacgggattggtgtcaacggtttcgccgctgtagttttcgtatccgctggtccgctgtctgtatctgtccctgtcgccgaaaaatcccctggaataatagaatccgcggtaataagaatgggtatggccggtcgcatggtaaggcgtgttggtgctctgatatacataggcgcgggaactgatctgcaccatggtggtctgatccgtgctggtgtataccagacaatattcactctttgtcaggatagccaccgaatcatcttccccattcttctgcacatcctcggtcccgccgtcaatggcctggataattgccttagccgcgtcatccacggacaggtcagtggagtacacatccgccctctccttctcgttcaaatcagatgtaattgacgtctgataggagaaattaatattaccttccagatatttatgtatggtcttcttatttgactgtatgtacgtataggataacactccaagaaccgccagtatcactgccgccacagccaggttcttcatattgacaaaaccaagggtcctgttgctctccacctgtccggaacaaccgctgtccaggagtacgatttcatccatatccagataacagcctttggaatactctgtttcatcctcccattgctccaccgcaatgatgagctcttcggtaccgtcctcgtactccgtataacggaccgtgtctcccggtgatgtatccacctggccaaagcaggacgtgacaactgcctgccctgcatccgcctgacggtaaccatcccggaatatattcatctcatcaaactcactgccatagggacactgggtataaatggcgtattcttcataaatattgtcaatgctgagccattttatccccctggtccgggtttccaacaggcagtattcccaccagcgggaaccgtctgaacggttgtggaactcaattccccctgtgacccggtattccgccccttctatggacagattctggtccttattaaactgtaatgttttacccatggacgtcctcctttgccctgtttaacgccctcttaatcagccttgtttctgcctgctctgcttttaaggactctgtgagaaggcggcatatctctcccggtatatcctcctggcaggaaaatatatccactgccgcatacccatactcgggccaggtgtggattgaaatgtgggaggtggttatgactgccaccgcgctgatgcccatgggagagaatttatggtagcattcctccacaattcctgcgcctatgcattggcagaccatgtgaatcacattttttatggaatccacatcatcaatacaggacgtccggcatccatagaggtccacaatcagctgcctggcctctgcaatatctgtttcctttcctgtcatggcaatttcccttcatcgtttaagtgattctgcggctctgctgccatggaaatacggcagcagcagcctctttctgattatatcagactgactatatggatacaattgccaaattcttacgataatacaaaccgataatacaaacccataatacaaaacgcgcatgccggttcccatcacaatggatatcggaacggcacggcacattcaaactgcggcaaggccatgtcagcttatataaagtatgggcacatttcccagtacacgtcctatctcctgccgcagatacagctgtgcctcttccctggattcggcccggtagcagtacctcccccgtcccctgcccgtcatctgctccctgtcatacaggtccggcgcattgggaaatgcttcgctgttaatggcccggtggacataggaataggtcatcaaaataatctccagaaacatctggcttttcattttatctgaaagtccgtccctcagttcttccaaaagaccggtatacatttccttccagccctccactaatatgacgggagctatcaggagtccgcagggatatcccgcctcacacatctgatttacagcctcgattctctgttttaagccggatgtgcccagctctatcttccggataatgggctgaggattgacgctcatgcggaaaatcaccttgcctctgtggtccaggtccagcagaggttccaccatatgaaatttggtgggaaatgtaagttttccctccccctcctctgcaaaacgcggaattgtataaagaagatttcccgtaattgtgttctccagcaccagatcactgttgcttccaatctcaaaggtaaggggggtgccgctgttctttccctttttgataatgcggtccagcatctgctcccggttcacaaacagtctgagataagcgcatttattatagttgcaaaccagatagcagtacaggcacatggccgtacagccggatgaggtgtatgggaccagataatcggataccttgtggttttccacgtatttgtgggtctttcgtatgcctgctatcagattgcgtttcatgtgtccgaactggtcattgggtttttcctgcatctcccggatggaattatggctctcaatgggaatccacggcaggtccctgtattcctccctgagctgccggcccagagggtagtcaaagatagccggttcataataaactgcgtcaaatttcatggatgcgccttcctcctgataaattcatagacaatatgggaattgggttcaatttcttatttttactgtttaacattccccaaatctgtgaagttatcaatggaaaagccgctgtccctttaatgggcggcagcggctttgtttgaacagtattaccggacgcttctgtttttctccttctcccaatcacataacaatcatattttctcccataaccactctacaatcccccgctgcgctctctcaccataaaagaacacctcatactcattccccttctcactcaaccgtttctctgcctcaattccaaattcccggcccttgtccgtcagtcgtttgcggggtattccatttacgtaatattcctcaaaattcccatcttccatcaatttctgttcaacggattttatggtcagccgcttcattgtatcttcatcccgcaggctgttaatctgcgatacaaaatcactcagactggactgttctgagtatcggactctggcggccagttccccggtcatgacaaaatccgttttgcctttacctgcttttttctttctgaccgtgtttagctctgccggtgcttccctggttctttcatcctcccggctgtcatttccttggctgccatttcccaggctgccattttcctgcctgccattttcctgcctgtcattttcccggcttccgtattcccaggcggtcagggctgtctccagggaccagtcgtcgaacgcatcgctgtcgctggtaaaatacaaatcatcaccctcaaaagacatctcagcaggcctgtcattcatttccgcctgcacgcaggccagaaaacgttccccgtatttctcatacttaaactctcccacacctgaaacattcagcatctcccctttcgtaaccggcttcacgatgcacatatgcgtcagcgtcttatctgaaaaaaccatataaggcggcaccttttcttcctttgcaatctccgtcctgacagcgcgcagcttctcaaacagcgtttcgtctgcttccgtaaactctgctccgcccggtccggacaggcctgctgccagccctttcctgccttttcttccctttccggcacttgcgccggacgctttggcaggatgctccgcttccctggccatcttcatggccaccggctcaccctcttccaggattccctttgactttcctgtcaattttacaatggcatattcatcgttggtcactgccagatatccgttcagcatcagatggttcatcacctgccgcagcttgtaggccggtacctttgccagttccccataatgcgggttctcatccatcctgtaattgcgtatcttcgctgtattggcaccgtggaccgtatcaatcatcacattggttccgtacctctgccgactgctctccacacatccaatgagtatacgggaaatatccgtcacgtccactgtctcaaactggctcaggcagttggagcaattgccgcagtaattgcttccgtactccccaaaatatctcagtatgtaatctctcagacattcatttgtaaagcagtaaaatgtcatcttgcgcaggcgttccctgtcccgctccatgacgatttcccgggttatgggatccaatgcctcgttgtcctggttatggtcaataaagaactggttggtcaccacatcctggccgccgtacaaaaggatgcactctgagggttcaccatcccttcctgccctgccggcctcctggtaataggattccatattcttcggcatgttataatgcaccacaaacctgacattggacttgtcaatccccatgccgaaggcattggtggcaaccataatctgggccctgtcatatataaaatcctcctggttatgcctgcgctcgctgtcgcttaagccagcatgataccgggtgacggagaaaccttcccggatcagctggccgcaaacttcctccaccactttcctggtcaggcaatagatgataccgctttcccccttatggcgttccaggtaatttaccatggtggcatatttatccttgggagactgtacgccgaagtagagatttggccggttaaaaccagtggtcatgacctggggatttctgagcataagtatgtcgatgatatcatcccgcacttccgctgtggcggtagctgtaaaagcacttacaacgggccgctccggaagctggttgataaaatccactattttcagataactgggcctgaaatcctggccccattgcgatacacaatgggcctcgtccacagctaccatggatatcttcacctggctgctcagcgcaaaccgcagaaagtcctcagacatcaggcgctccggcgcaacatagataatcggatatcttccggctctggccaggtctaataccttataatactgggcagctgtcagggaactgttaatgtaggcagccaaaatacccacctggtttaagttgcttacctggtccttcatcagggaaataagcggggaaatgaccagggtgattccatccatcataagggcagggatttgataacacagggatttcccggccccggtgggcatgactcccagcacgtcccttccttccagaatgctctggatcagcacatcctgcccatccctgaatgtgtcataaccaaaataatgttttaatatttcatattgtgtcatcatcaaactcctctgtattgctccggcataaaagaacccaatcgtccctgttcccggcgtttagcgccagacttatcttcagctgtgcttcaaaaccatggaaaaatggcgaatacgccccgcagcggacctgctgcctaaagcagactaaaccgattaaacatatagatgtaattcattataacaaatccgaaatgataaaacaatggtgatttatgtgtccgatggtggtttctccggcctattctctggcttatgttctgtcaaaaaaaacagccggacatctctgtccggccgcagcgcatcttccatcatcctatcacaggcggtgtcctctccttttttaacaaatttatggaatcccggaatccgccgcagtctccggtaatccctgccccatggcctccctatggcctccgccatggtttcagccatagtttccgccagggtgtggaggaaaccagccgtttcagcagcctgggtatctccccgctgtcctctgccagcaaatccccgtccccaaactcatccgagcctccatatccgtacctgcatccgataaacgctgtctcattggcctttgccgcctccctgtcatagaaacgatcccccaccatacagcaccagtccgcaccggcccgctccatcagcacacccaggctgtccgccttgtactgcctggtggtcaggccctgtatatagtcaaaatactcccttatggacagtacacccagcacatcctccagttcatcttcctttgcattggaacagaccgccagtacgtacccctgttcctttagctccccaagcatttccgggactccgggataggtctgcgccctctcacgcataagagatgtccagtgcctctccaccgcccggtaaaagcgtctaaaggtttcctcgctgtcatcccccagaaagaacaggctgtcatccctaaagggagcaccgaacctggagcgtatcacgctctctgcaacaggcccggcccccagctccttaagggcttcctgataggccgccactgcgtatgtatgagtcatgttcagggtcccgtccaaatcgaacgccaccagctttgtcattttccattcctcctagaaaattccaatccaacaccccgcaatgcagattacaaaaatgcccagaatgatggcaatggtttttacattccggttaaacagccatacacaaagaaatgtggctcccagaggaagcagtcccgggaaaatctggtcaaagatggactgcaaagtggtctctgttcctgaaaactgaaaggtcagggatgtcttaagcgtcaccatggttccaatcatggctcctatgaccgtaagtcccagtatggatgccccgtaggacattttttcgataagatggttctccgcagagttctccaggaacctggttcccatcttgtaaccggcatttccggtaatatatttggtaagaaaatggattgccgtgtacaggaagaaatacagaagggctcccagtatgctgccctgctgggcaaaggcaatgccgattccggccgtgatgacgcggaatgtaccccagaagaaggaatcgccaataccggataacgggcccataagccccaccttcaggttattgatggattccttattaaaattgtctgctttggcgcattcctgttccattgcaacagaaaggtcaatgacaaagggagagacatggggcgtgatattaaatgtctctgtatgccggtgcagcgcttcaaaataatcatcgtcttttgggtaaatctttctcagaggcttttcaatggaatacataaatccataggccatcattttatcaaaggaccaggaggactgcatggtaaagcttctccagaacacactgcgcaaatccttctttgttataagggaagtttcctttgtctcctgcatctaaaaatcctcctcttcttcaaatttcatatttcccacggcaataagcgccatgcacagtccggccaccgcgactccaatcacatccatattgatatacatgactgctatgaatcccaggaacaggtatggcatcagttttttgttgcccatcattttaatcagaagcgcaagtcccacacaggacagcacgccggccgccacgtcaaatccgtccagcacgacctgggggatcagcttgataaccgcattgatgctgcctgcgccaaaatacatggcaaagaacaccaggagcatggatggaacacccaccatcagcggcagtgtgatgagatgccacatgtttgcccttcttaaatttctctgggccagggccttctcgatctgtttacctccccaactggcgcctatggcgtaacagccgtttctccacatctgcaggaatatggacagaggcagtgccagtgcaacggctgtccccactccctccccgctttggatggcaatggctgttcccagcacgctggaggcatacacctccggcggtgtagcgctccctaccataatagagcccataaacatcagttccagcgtggcgcctatcatgattccggcctggaaatcccccagaatcagccccacaatgggcgcggtaaataacggcctccccatcatggacgccccaaatgtatattcgtcaatggcagccagaaaggccacaattgacaccagtattgcctgaagcataatccttctcccttctctatcctctaactgattcgtcttattatatcaatgtcattgcatccgtctctttatccgtaggcactgcccggcattcaaccactgcaccggcctgaaccatggcgcggatattccggacatcatggtcgtcaacagccagggaattggtgatgatcctgcggctctctgtctttttcatattgccaaggttgatgtggtccacacccttcacattctccaccagtttcagcgcgtcatccgtattgcccactataacaaacaccttgtacttgtccgtctttgtcccgtttaaaaggacaatggcatccgccacggactttatggaaaatttgattcctgccggtgcggccagcttaagggtagtggcccgtatcttatctgccgcagcctcatcatttacgaccagtatgcagtcagctcccaatgaattggtccaggcaaaggccacctgtccatgtaccagtctctcgtccactcttgtaatcttaatcatacgaaatcctcctcactctcttcaaaagcctgcttcatcagaccgttgataaacacacacccttccctggctgcctgtattccctgtgtaatcagctcctgggtatccatggcgctctccagcataggcaccatggccagcagcatgggcgcattgacgccggccagtacgtaaacccccggatgggagatatgccctgagaaagcattggccacgctgccgcccagcacatctgtcaggacaatcagctcgtccccgtcctcaagctcatccaccacagccgccgcttccctgtccatatcaaaatccggtgtggtatacgcgctcaggacacctaccttttcatttcctcccaggacaaaatccatggtctgcttcagtcctccggcaaattcaccgtgagtcgcaatcaatatctttctcatggggcaatctccttttctattccttaatactccaccgtcctgtagtatctgcgtatatccaggctgtggtccttcacatgttcaaaatgagcgctgacacgctctaactgggtggacatgaccatgggagagacatacttcctcatatcggcgtcaatcccctccagaggataatccctggtatcccacacctgcaccacatccgaatacttcctgacaaagttctccactctgtcaaccagggggcgcgtctcgtcctctcctttaaagagcataaagctcatgttcttatccgtcatctccacagtgccgtggaaaaattctgccgcatgaatggatttggtaggaatccagagcatttcctccaacacgcacatggcaaagcaatatgtctccccccaggtattgccggctcccacacacatatgaaagcctgtatccttatgcttttctgcaaaagcaagtgctcgttcgtcgttctgctcccgcacctttaacagtacctccggcatcttccgaagtgtttcaacaaaccgttcgtactgaggaaactctccgtttttcatcatcagtctggctcccagggcaaaaaactgtatatgcagctcctccaccagattgtcattgcaggcagcattctcaaccacataatccgagacagcagccagaggagctgtcctgtcccccacaaaagaaatcactgtggctcccatgcttctggcatactctgccgccgcaatggtttccttggtggttcctgataaggaggccgtgataaagagagaatctttggtcagtgatctgggctttgcggccagcagctcggcggcaatttcatgataccataccagagcggagtttgtctttagcatgtatgccagcgggctaatgatggcataggtgcctcccgttccaaccaaatagatgtttttatatcccaaatcactcaccttatccgcaatcctattaatctcaccgatctgggccactgctccatttaaagtttttaagaaatcctcattctgaaaaccgtacatcataatcctcctcttgattagacaaattgaattttatgtatttaaccggatagtgtttgtacaaaccatcttgtgtttttaatataccaacatcattcacctttgtcaataccatttttcgtaccaattatattttattttatacaacattgcattttcctgtttctttttttccaaaatatgatataatgaggcaagggaattaaatcgtgcctgtccggaatacggacggtttcagccatggcaaaggacggtttcagacccgataaagaataaatggatacccggcatggaggaaacggatgcagaggaaacagatacagggagaacagaggcaggataaacagatacaaggtgaacaaatacaggataaacagatacaggataaacaaatacaggataaacagatacaggataaacagatacagggaaaacagaggcagagcacgcagacacagagactcacaaaatcagaggcatttacccagacgctgaaacgcaatatacaggaggggacctatccctatggcaccgccctgcccgctgagcgcgagctggccgagaactttggacttaaccgttcaaccgtaagggctgccatccagaccctggtggaggaaggcttgttaaaaaaggtccagggcaagggaacgtttgtgatgcgccatgccagggataacgcatacacccatttccggggcatgagcgagctgcttaaaaatcatggatatgttccttcctccaggattttatataccggtcccacaccagccggttacaagctctcccatctgctgcaggtgggcgaagatacggtgttgtaccgcatcatgcgtctgcgtcttggcaacggactgcctgtatccattgaaaatacctttgttccctatgaactgattcctgatatagaggatattgatttccagatatactctctgtatgatgcatttgccatgaattctcttcgtattgccggcatacagcaggttttctccaccacccgtgtgcgcaactccgaagccaaatatctgaacgcggaaaatgggagcccggtggtatccattgccatcacctccgccagcgaggaaaacggaatcattgagtacaccaacgccctggtgctcccggaattctgtaagttctactccgacggcgttatccaggacagcaaactcaatgtttatgcgcaatccatatagaccaccgataggttttaagataccagaataatctttattccatcgtgacacctattaccagaaagggtaaccagtatgccaaaagttttcaatcttctaagttacgacattgcagaatatatagaaaaatacatccacgaacatggtctgcagccaggagaccgcctgcccacggaacgggaactggcggcccagttagatataacccgtgtcagcgtgcgccagggatacaaacgtctgttagaccagggcgtcatccggtctgaaaacggctattatgtgaatccgcccagaacagaccgttccctgaccgcctattgttttccctatgcggattcttatttgcatccggatacattttccgtaaaatcaactgaatatatgccggaggccatccgcaatatatgcaataacatgctgaatgccgaccacagttcccatctcaacatgaaccgttttatcgaatatctgtccgatattcccgtgggaatcacttatacggcccagaccagctcgtccatgccgtccttcccaggactattctatctgcgctccatgccagagggactgaaacagacccagtatatgcgggtccatcagcccagccgtgaagaatatgaactgctggagctgagcgaacacgacagtatgctgatgctggtaaatggtttccagtacgaaggcacccccattgctgtcagcgttgctctctgtgtagggaccaggatgaatttaattgcccccataaccatatgattccctatggccaaaaggacttccctcaccaggcccgtccccaggccgatccgtatgatatccataaggagttgaccgctatgaaaatcctacctgcatgcgccgccgacacagcaaaaatataccgcatcatgaccgaagcccgctccctggcgccggaccccggctggtactgtaccgactcagaggaatatatacggtcccacatcgtaaatcctgatgagggaatcgtctttaaggcagtggaacatgattgtctggctgcctttttcatcattcattttccgggtaatacccctgacagcctggggcactacatgaacctggctcccgaggcccttgacagggtggcccacatggactccctggcagtccggcctggcttcagagggagaggtcttcaatatcagcttatggcccgcgcagagcagtatctgatgaccacttcctattgccgcctgatgggtacggtccatcctgataaccggtacagcctggacaattttctcaagctgggataccggattgtgaccaccaccaaaaagtacggcgggcttccccgccatgtcctgtataaatccataagcaatcccccttcttttgcgggttccgggaataatactgcctctgtttctatatatttaaagtaattacttctgaaacaggacctatcctttatgaaaaacagactcagaagacttcccatgaagaagctgttacagaccaccctgctgtttgccctggccttttgtgccggacggctggctgcccaggtagtggaatacaaccgtcctcccgaagcagtgaccacctcagcagacggcaactggggacttagtttcccgggcgagggccagatgcctgtgggaaatgccaccgcagactatctgaagcagttcaatgcctactatgcccagaatacccaggataaggtcatctacctgacctttgacgcgggttatgaaaacggaaacacagccgctatcctggacgccctgaaaaaacacaatgtacacgccacctttttcctggttggaaattatttacagaccagtccggacctggtaaagcgaatggttgccgaaggccacaatgtgggaaaccataccttccaccatccggatatgtcgaaaatctccaccaaggaagcctttgaaaaggaactgaatgacctggaaaccctgtaccagcagaccacgggacagccaatgaaaaagtattaccgtcccccccagggcaaatacagtgaaagcaacctgaaaatggccaatgacatgggctataagacttttttctggagtctggcctatgtggactggtatgaagataagcagccaaccaaagaggaagcctttaaaaagctgctgacccgcattcatcccggcgccattgtcctgcttcacagcacctccaaaacaaatgggcagattctggatgaacttctgaccaagtgggaggaaatgggatatcattttggaaccctggatgatttggtggcggcagaccaggcatagagaatggctgtatcgtactctaagttccacaaatattatgaaaaaaaatatcatttaaaaatgccggaagaacgcactgtttataaggtgcatcttccggcatatcatatttcatgtcaggttgattatatgtgtgtgttaaaatctacagcagcttttccttccactccgcctccttaaatccggtgagcacaaagccatcccccaccaccagcggtcttttcaccagcatcccgtccgtggccagaagcgccagctgctcgtcctcactcatggacggcagtttatctttcagagacatttccttgtagatatttccgctggtattaaagaaacgctttagagaaagcccgctcatcccgtaccattcctttaattcctccagggtgggattctcctccctgacaggcctttccacataggaaatcccattggcatccagccactttaaagccttctggcaggtagagcattttttgtagcataatacggtaagattcatttttattcctccatctgttctatttccttattctgcggcaaacctgagggtcctggctgaaccgtcaaaacaggatgtatcttcattataagtaaccatatcctccgtcgaatatgtaagcagggcagaatgagttccccccatccatcccccgaattcttcctcatggcctgccatatgttctggccggacagcgtcaaactccacaacccggacatcgccgggtcctgccgtcacttttctatctgactttatggatggcttcatctccccgctgccgcctgccagcaccgctgcaccgctgccctctgccgtcatctccccttctgattcttccactttgattctgcatgaataaatgccgattccacattggcccaaagctgaaaccgtactggttccaccggcaatatccacctccggacacgatattcccgcatacgttccctttatatccagctgtccgccctccaggcgcagggccgcctggctgttttccgtccggttccccaatatgcctgctgttttggcttcaatgtccaggcttccctttccccgaatgaccagggtacctgaatgtatgcgtatacctgcaccttctgaccggatccagctgccgctgccctcctttaactcgatggttaaatcccctgttatatcaattgccgggtgggaggactccgtgctttccatgactgtatttttcatgactgtgttttctataactgcattatccaatgtcagcgtatagctgtccctggaatttctcagtctccatccgtttccctccaccatctttccccttcccggaagttccacctttccttcatttcccaggtaaagagctgtcagcggcacctgctctctggactgggtcagcccatatctggatgccagatatatgcctgcgctggatatggcagtgcagaatacgatgataagaataatgaacagaacagcgcgtactgtcctgcccacaaatccctttgaaatcttatccatatagatgtttcctcctgttacagtttcgtttattttatcataaagtaatccatttttccattacttgtgatatcataggagaaaagtgtggttactgattggaacagctcaaccatgcaataaggaggttctgtctatgataaatattctctgcttcggcgactccaacacattcgggaccaatcccaaaggaggacgccattcctggaatacccgctggcccggacggcttcaggttctgctggggcctgagtattatgtgattgaggaaggcatgggcggacgcaccacggtatgggatgacccgctggagcccggacgatgcggcatccaggctcttcccatggcactccagagccacaaaccgctggacctggtcattctgttcctgggcaccaatgactgcaaggcccactttcatgcctcgcccagggttataacaaagggaatggaaaacctgtgtcacacggttcagggatttgattacggggaaggctataagaagcccaagattctggtgatatcccctatccatataggaaatgacatggaacactgtccctatgtcagttttgatgaaaccgcacccggtaaatcaatggcccttgcgcccctttatcaggagctggcaaaagctgagggctgtcttttcctggatgccgcatccctggccggtcccagcagcattgaccagctccacatggacgcaaagaaccatggggcattggctgagggaatcgctgaggtggtaaaggggtattttgaaccctaggggtgaaaaaagccggaaaacgaatttcgctttccggcttttcttgtttccatgcacacatttcctctgatggagcagcgcaaatcacactgggtatccgctctccatccccttaatcctccggtacagctccctgttcaccggcacatccaggccggtcgcctctgcccggcgaatcacggtgcccgcaaaaaattccacttccgagggcctgcgggccaatccatcctgccgcatggagggcatgccatcagggttcagactgtcaatcaggtcaacataggcgtccaaatcctccatggtcacccggattccctctcttccggccagctccactacttcagccatggctgccttcatcatctgtctggccggtccctgcttttgtacggttccataagtcccttcctccaccatgacagcctggttcacccccacattcagcatccatttgcaccagagcctgcgcaggatatccggctctctggtatagggaagtcctgtccgctcaaacagctctgtgaccgcctccagcattgcctctttctgcggttcatgttggggaatccctatacatatctgccccatatgggaataggtcagctcatttcccatcttcacggcatccattccctgggccacgcagtacagcatgtgctccattcccagtatgtttcctatgacggcttcactggtgattccattgagtacggaaagaatcacggtatcctttcccacctgattcctgaccatggggacagacgcctcaagcgcagtggctttcacggcaaatatgagaagctgggccggtcctctggggtctgcttcatctcccggacagaccgcgaatttccatcctcttccgttacaatataccgtggtatcccggtaacgttccacccggtccctgtctgccaggaatgtcacctgctccaacccaagggtccttgcaaagaaatccccgtacaatacacccaacgcacccattcccactatggatactctcgtaatcctgtccatgtcttacctccgcgctgattaatagaatctggcaatctcccgtaccatacagcgctttggcatctgagggtcggccgcgccatatccaagggcaatgaccgccgccacatcctggtcctccccaatggagagcagttccctcagcttaccagcatccctgattcccatgaccagggtgtccaggcccaaatcctttgccttcagcagaaggttctggttatgcatccccaaatcgtagcagccccacccgtttcccagctcattggaaggggttccgtcattttcatatcctgagcgattcttaacaaaggcggccacaatcagtacaggcgcatccttgctgtttgtctggttaaaggccggaaggcaggtttcctttacctttttgagcatgtcatctgacataaccacatagtatctggctgtctgggaattcttccaggacggcgcaagggtggctgccttaaggatctcctccaccagttcacggctcactttcctgtccggctggtactttctcatacttcttctttccctcaatactgcatctaattccatatgaatcttcctcctgtccattggttgatatccgaaaactgcttttaaaggctggttttgattccggaacgtgccgcaaactcagaagcctctgtaatcctcctgtaaaactgcggatagaactcttccccgctgttataaggagttatgtaaaactgattcagcacatacataaccaccgttctcctgatgtccaggctcccattttcttccagtccatgttccagatccttgagaaaataatgccagtcatttacaaatttctcatacagctttacatccggggtatcaatccacttgcggacctttaccttgcttctgttatccttaggacactcatggacctgaaggaagtagctgaaggaccggttctcatacagtcttcccagcgggaagagacggcagaacccaggcctgtaagaatggataccgcacctgccctctccgttcaggaaggaacaggcctcatcccggcctgtcatccggatattgggcaggataataccgtccaccatattcacctcaagtgggccagacagaagctgttccggtgtcatcccaaggttccccgtaaggcggaacatatccagagggtccagtatgatggatgaccccataccgcggcagcaggcagaacagccttcacatccgccgctgtcagccctcaccatatcattgataccatataatttcccatcggatatatcctccagactgacttctcgttccatagctcccagtactccctttccagcagtttccataaatagttctaacagacagtataccaccctttcccggtttcacgcaaccatgcttttatggggcaaagccatctgaaaagccgtcctttttcaccctaccctctgtttttaagcaccataacagctatggccagacctgctatcacagccatccatccgcatgtcacccacaatggcagctgtatacccagtgccttattcaagggaattagtaccagagaggtaagcccgatctggttcagaaagcagactctttcatacagcttccccctgtccctctcctttttcataaacggctttccgctgtccggcagaatccggttcaaatcaggcacctgccagcgcgcctttcccgctgcgacagctcccaggagcagagccggaaacggtgaaatggttatgacaaggcgccagatctgaatgaatttctccggcagtcttattcccaaaacctggttaatcggaaacataatcatggatacaatgcacagaaaacaaaataagtatgccatatcccttgccttgcacagcctgtcaatcctgtcctttttcatgatatcctttcctttctttttccattccagtttcatttccagcagctgcgggtccagtgtgtcaaacctccaccctgaatccctgacctccagacacacttgtctgacgcgctccagctccttaacttccttttgtatctgtcctgcccgagcttccatgagaaccgctgccctctgaggctggtctgccagctggcgaatctgggccactgaaaatcccatgatgcggaaaattcgtatctttctcagatgttccacatcatcctcactgtactccctgtaattattggaactccggcccggagctaaaagaccttctttctcgtaaaacctgatattggcttttgtgattccagtcagggtctctacctctttgattgtcatatacacgcctccttacaggtttattgtaggggttgaataaggttgaatgtcaagccattcctgtttttttatgtactttttcctttatgtcaaaagaaaagacagaggaaccatgcgcctgaccgcccatgtctcctctgccatatgtattgttctgtatctaatccatttaatccccggcctgttcctccacgcagggacggtccggcaggctgtaacggtagcatctgctgaatacgccgatttcttccagagtagataccatgcggtacacggttgccataccaatggccgcatcgcgcttagccgcctcgtaatatatttctttacagcagttccactttccgcttagtatgacatccagaaggatcatacgctgtttggtcatgcgtttcccctggctcctcagctcctggataacccgctccttctgccacgtacgggactcctctctctgtttccacggcatatcgctcagctcctttactttgctgtcaggcattggcttctgcccttcagacattgcttctgtcctgtttattaagtaagttaaagctaacctcattctctaaaatatgcagccgggcgcctctgtttcctgttccccacaggaattagatatccctaactgcatatatagattagcattagctaactttcttgtcaagaattttttttattttaccatcattttaccatcgcttttccatcagccattatccttcagattgagccccgccagcgccttggcaaatgcattgttgacaggctcctctgcttcctttttctgctggttcaggtatcgggccacgtcctttttggtcactccggcgccttcctttttcctgcgctcctcaaaggccttcagcttctccttatgaccgcacctgcacacaaatatctgggcatcccccttgcccttaagctccatctttttatggcagacagggcatctggcattggaggtgcgtgaaatgacctcccggtggccgcattcccggtcctggcacaccagcatctccgtattctttccctttacagccagcatccgctttccgcacaccgggcactttgtgttggtcaggttgtcatggcggaacgaaccctcacctgtcttaatctggcggatcagttcctgggaatatcccctgatgtccttcatgaacgcgcctcttttcaggcttccctttgcaatgcccgacagcttcatctcccagtccgctgtcagctccggcttcttcaggtcctcaggcaccagctccaggagctgcctggccttggacgtgaggcagatatccttgccccgtttttcaagcaggaagctggaaaacagtttttctattatatccgccctggtggcaacggttcccagaccgccggtctcccccagggtctttgccatggccttatcctttgtttccatgtacgccacaggattttccatggcggagagcagggttgcctcattaaacggggcaggcggttttgtcttaccctctgtcatcttaagggacaggccatgtaacacatccccctttttcaggtccggcagctgctggtcctttacctccggctcgtcctcttcttccccgtcatccacagccgtgtcgtaagcagccttccagccctggctctttactatccttccctttgcaataaaccgctggccccggatatttgcttccaggctggtctcgtcatattcaaagggcggatacaaaacagccaggaacctgcgcaccaccaaatcataaatccggcgttcatcaatggtcatatgatccatctgcacatactgttccgtaggaatgatggcatgatggtcggaaactttgctgttgtccacaaaaaatggtttcgccggcaggggttggttcaccagccttccggccagtgtcttatagggtccgacggaacacgccttcagacgctccttaagggtggggacaatatctgcgctcagatacctggaatcggttctgggataggtcaggactttatggttctcatagaggcgctgcataatgttcagcgtatccttggcagaataattaaaccgcttattggcatcccgctgcagctccgtcaggtcatagagaaggggcggctgcgtctttttaggcgtccgctttacctcagccacaacagccgcctcccccttaagctcctgagccagtccctccatccggccgcggtcaaaggaacggtggctgcctgtccctgcatcctgccatgtaaggaccagcccgtcctttctggcctgaagcccaaagtatggctggggtacaaatgcgcgtatctgcgcctcccgttttgctatcatggccagagtcggggtctggacacggccgcaggaaagctgggcattgtatttgcaggtcagggccctggtggcgttgatgcccaccagccagtccgcctctgccctgcacatggctgcgtcatacaggttattgtattcccttccgtccttcaggttcgcaaatccctccctgatagccttatccgtcacggatgatatccacaggcgccggataggtttattgcaccctgtctttttcagaatcagccgggccaccagctctccttcccttcctgcatccgtggcaatgataatgtcccccacatccccccggtaaatctgggttttcacagcctggtactgctttgaggtctgcttgataacctcaagcttaaatacctcaggcatcatgggaaggtcctccatcttccactccttatacttcttatcgtaatcctccgggtcagccagggtcaccagatggcccagcccccaggtaaccacgtaacgatccccctcaatggcaccgttaatatttttcccgcacttaagaacccgggcaatgtcccgggcaacagaaggcttttctgctattacaagtgatttcattgatatactccttatctcagttttaaaccgcaggcccctgacgtccctgtcaggaacgtttcctggccgacacaatcagcatcatgggtcttcgcatttcatccagcataccgggaatatgaagcatactctccggcggctgcggctccaccacctggctgagttcaaaaccatgggtcagaagggtattgaggtaagtggtcagggttctgtggtacttaaccacttcttctcccaggaacacagccttgcgcttcccctcatagtaataattatccacaggaaaatggaggatatttccattttcatcgtagtaccaatcctggcttccgtaggcggtaaatacgggatgctccacggaaaacacgaaatatccaccgggagccagcgaatccctcactttatccaccacctggctgaagctttccacatagtgaaatgccagggagctgagcaccacgtcaaaggattcatccgggaaatcaatgtcctccatggcacactccacataccgcaccctggaatcctcggtcttttccctggccacctccagcatcttaccggaaatatccacacccaccgcagaaaccgccccgtgttccatggcatagatacagtgccagccataaccgcagcccagatccagaaggcgctgtccctgaaaatcaggcagcagcgccttaagcgtctcccactctcctgctccggacagtccttttttagaacgctccatctggctgtacttttcaaaaaatatatcattgtcatatttattttctttcattattatcttcctttccacgtattgctgccttcattctagcacattccccctggcctgtcaccgctgttttcatttcttcatatagtatattgtaccgattaacactctacctttaaggaggattgacaatgaaacatttacggggcgcagcaggtatcatcctgtcccttatctttgccgtgtgcttcatgtgctctcccgcatttgcggcttcccgcctgtaccagggcatggatgtcagcagctggcagggcgatattgatttccaggctgtccgggctgccggtatccaggtggtctatctacggaccggcgtgggattggaatatgtggatccctatttccagaccaactatgagaaagccctggatgcaggcctgaacatcggatactatcactatgtaactgccgccgacacctcccaggccaggcagcaggcagaatttttctattccctgatacaggacaagcagattgactgctgcccggccatggattttgaatcgttcccaggtctgagcacccaggaaatcaatgccatcggactgtctttcatggaaaccctgggcagcctcctgggatatgagccagccctatatacagactcctacaacgccgcctacctgtggagcagtgacttttcctcctaccccctgtgggtggctgactacgatgtaaaccagccggagagcacgggcccatgggattcctgggacggtttccagtactcggacaggggacgggtaccgggagtaaacggcgatgtggacatggatttctttaaagattccatgtttattatctcccggacaccccagcctgaaccaaatcccggcgatataggagtccttctcacctacaaggtgcagggcggcgataccctatggagcatctccaaacgattcggcaccaccgtggaccggctggctgaattaaaccatatctccaatccgaatataatttacaggggacagattctggagattccggatattcccggcgccatcatataccaggtgaaaagcggcgacaccctctgggccattgcagaccgttttggcaccagcgtatccgagctggtatttaccaacgcaatagcaaaccctaacctgatttacgtggggcaggttcttgtcataccataatggagaaaaacagggatatcctgaaagcctgtccggctccgggatatcccctccttatgattcttctgctaccggccggaccgcagctggctggtcagcaaatttccaaccgtatccgcaagctgccccatctccttgatcctgacaaaaccgcttccgtaaatcttcctggcgccttccaggtcgctgtccaggccgtagaatacagccatgaccctgattccctgctttttaagctgccgcacctccatggccgcgtcctcaatacctgcatcccccgaatactccttcccccgcacagctcccgaaacaggagccatcctttgttcgtcattggggctggcatctgtcagcacaatgagcaggcgtttctcgcaggaggactgtcccgccagatggcccgctgccctgagggccagaccatcccggttccatccggctgccacatagtcaaggattcctctgtttttctccttctcctcatatccgcggaacagacgcatcaccgtgtaattctgaatggtggaaaaggaatacacctggaccggtatcccgcagcgggtaaggctttcggcaatcacatatccctgcgccgctataacggcttcatgtcccatccgtgacgcagacgcgtccagcatcaaatccacagaaacattctgccgttcttcctctgaattcttcaaaaacacacggtcgtcttccagatacacagcccgccagactgcctcccccatcatttttccctgccggcttttttcgggtacaggctgcaaatccaccagaagggtattctgaatccgttccatcaggcgtcgtatgctgttctcatactccggcctgttggcttcaaactgctccctgttcttttttctctgctgccgcgcctcccacagctgtctggccgattccccgcggtccgggacctgcagaaaattctctccccttgtaaaatggaggctgcatgtgctgtggcatcccgtgcagagcatatggcagatagcctgattctgctgctctgcgtacatggaaataccatagcaggcatctatataggagcggaccgcctcctccctccgtttcgaggatgcctccagccagaagcaaaagcctttggctgcatcagaaggctttttatgggcctttccggatttttcacattggtcatcaccggattcagtggaatcctgtccatgctcattcagtgtattcctgacaatcacgccgtgggcaggccggacaaagcggaagggcctaatcatgcttttaatccgttttctgttttcttttctcttttgttctgaacggcagtcaaaccggaaatattcccacagtatgccggaaacgcgctccataatttcatcggtgtcggcagacccgtcaaagaacaggccggacaaaatcccccgctcccagggcgtcaccccgggcttctctcccagaaccatcctgccccagcccgtctgaagggactggaccagcttttcctgagccgaccatttggattcctccaatacctgggcccagtattccctgcgcagctcctccaccccaggccgcccttcccgctccttctcataggcaccgcactccaggccaagccagaatatggtatcatagatatcctggagcgccgtaccctgaaatgccccgaacatttccgacactttcccgccgtcataccatctgtggacataaccgataatactgttgagataaaggtctgcccttccgtaccggtcaaaggccatgaattccggccggaaggagtggtcctttgccgcagtccatatcatgttgagggcccgccgctcctccccgtcatattcctgcattttaatatcagtctgcaaacagcttctccctttccagttttttaggaatccttgccctgattaaatcccgaaccagggtctgttcataggggtcaaaggacttgttggtaagtcccatatccagggcggctcccgcatccagcccccgctccatgaggcggacagcatctaacagtcccctgaggtccagggggcgggtggagagctgggcgctttggcattttctctctatatccaggaacagctggacaaactgcctggcatatgtcctcttaaggccgggatactcccggtttatgagcttctccaggttttccccggttatagccggcatctgcagacaggaaaatctggaggtcagggcctcatttaactccctggtgcctgcatacccgtagttcatggtggcgatgaaccgggttccctcgtccatacgcaccacatcgtagcccggcacatctatggtccgcctgaaatccagaattccatggagcacggccagtgcctcatttctggccatgttgatttcatccagtacgccaaaacccccgctgattccgcagcggtacaccggtcccggacggaacacaacggctccgttttcaaatgtatctgttcctatcaggccggacgcatccatgttaacgtgaagggaaatgtcccaaaccggcctgccaaacgctgccgccagattctgggccagtatgttctttcccgttgccttcggccctgtgagaagcaggttctggccgcacaaaagagctgcaacggcctgctcccatacgtcctttccataatacaggtacctgggcacgggtatcctgccccggtcctcctccctgacaggatgggaagccctgaattccatgattccttcaattaagctgctgtttatcttttcctcttttaagaattcaatcaccgtcatgccctcttcctcttttttacagtctgattgtagcacagaatcctttgatggtgcagattttctgcgggtttgagaaaatatttttttgcagggtttgtaaaaatgtttttatacttgcttctcccggtcacggatgctatattagaactaccagacaatagcagactcaccaaccaggtacattaggaatacattccgttataccctttgtctgtttcccaccacttcattggtgttatcttaacatctgaacatcttaccatttatttttatattcaaacgcttatcctaattatttcattttcattatccacacaacctatacatggctattgtccggcatataaaaagggattataataggaatagcttccttaatgtttaccggaaaaggaggctcatgcagcaacacacgttaccccctaaccatcaaatacaggatacccccaatcagctggaggataaagtcctaaaaacagctgccatgttttttggtcaggatcttcttccatacctgggtgtcaggggtcggattaccggccttgttcccacagaacagattcaccttgaacttcgcaggatggaagaagattttaactatatgatggaagacggctccctgcggcatctggagtttgaaagtgacagcattacttccagggatctgcggcgtttcagggaatacgaagcttacttaagcctgatatataactgccctgttattaccacagttctatgtacttcccatgtcaggcgaattaaacaggaactcgtcaccggcatcaatgtataccgcatccaggtaatccgtatcaaggaccggaacgcggataaaaattaattgatattcttcaatcagaccatgtagctgtatcaaaggaaaaccttcgccgcatggaagccatgttttatgccctggccatcaaatttctcgacaaaacagaattaaggaaagtaaaggagaagattaatatgaccctgctcggacagatgcttatggaggatggaattgaaaagggagaaatgaccaagctcgtatctctggtcatgaagaaaatgaaaaaaggactttccccggaggagacagcagagttgctggaggaaagcccggattgcgtcagccggatttacgccgcagtgcaggccaatcccggtctggatgaaaatggaatctttgaatttatgaagaaaaaggatagagagaaggactaatatcctccaataatcattaccgcacataaagcccgggtattttatctcttataataatccgggctttttatttctcctttcacttcaccgtcatcacaaaccgttccctgtcatccttcacattataccggtaccggtcctcttccgcctgggcataccgtacctcacagcatctgagtcccagccgcctggccgtatcattggtatagatatccatagtgatttccaccggatatcccatgtcatagctgaaccgcacatcacggaattcattgttgatacacgtctcaatcatatccccggcaaatgcctccttatctcctatgtacagcttattcgcaacaatggttatgtgttctgtcctctttccatcccgggaggaggatatggtattcctcaccgacacgccccttccccactgcagatatatacaaagagccatcagaatcagtgatgcatgcatccgtctttttctcattccgcttcgtcccccacctgtattattatacatattgtactttaatacagcttatatttcaatacatccggagatatacttatctggagcttatacagaaaggcggggacggaatgcatattgagattgatttggagcgtctgctaaaagaaaaacataaaagtaaaaactttgtgtgtgaagaatgcggcctgcagcggactcagttcaataattactgcaagaacaaggtttcccgcgttgaccttaccattcttgccaaaatgtgcgcttgtctggactgcacgcccaatgatattttgaaaatagtaaaagagacggcaaaagatgaatagaacacatgacgccatgtgaagctgttcatctttttttgcgcctgtatttccaaaaaacaaaatgcagcggctaaattcaatccattctggtgtcatatcttgcaagattttcccttctcattgtgttaaaatagcagaaaagcagtttaaaaggagcagcaaaatgatacaggagcaggaacagcgccgggtctattatgataaagaccttaaaatagaagcctacaatctgagcggggttgtacagaaattccccaatcatttccatgaatattacgtcataggctttgtggagggcggaaaaagacatctctggagccgtaacaaagagtatgatgtcagcgccggggatttgattctctttaatcccagggacaaccattactgcgcgcccatagacggggaaccgttggactaccgtgcggtcaacatcgatccctctgtcatggagcaggcggtaagggaaatcacaggccgggaatttacgccccgctttacccggaatgtggtgtaccgcagcgacataacccagtccgtatccgccctgtacggagccatattgcggcgggccacaaggcttgaaaaagaagaagccctgttctttcttctggagcaggtgctccaggaatatgccgccccatttaaggaagaggatatatccaggcccgatgaccggatccaaaacctgtgcacctacatggaggaccatttttcagaaaatataagcctggatgagctgctgtccatgaccacctttggaaaatcctatctgctgcgctcttttacaaagcaggtgggcgtttctccctaccgatacctccagacgatccgcctggacaaggccaaaaaattccttgaacagggcatgcctcctgtggaagcagcggccatggccggattttcagatcagagccatttcaccaacttctttaaggagtttatcgggctcacccccagacagtatcagaaaatattcctatcagaaccggatgaagaacaaaaggagcattatcatgaatcataaccgtaccgccgcaggccatctggccgcatttgtcaccatcctcatatggggaaccaccttcatatccaccaaagtcctgcttcggacattcagccctgtggaaatcctgttcatccggtttgtcatgggatatctggcgctgtggctggcctgcccccgttccctgcgccttacatccgcccggcaggagggactctatgcagcggcggggttctgcggtgttaccatgtactatctcctggaaaacatcgccctcacctataccctggcatccaacgtgggcgtcatcatctccattgcacctttctttactgccatcttgggctggatgttcctgggaggagagagaccacgcttccggttctttgccggatttctgctggccatggcaggcatcagcctgattagctttggcaatgaggccgctttatcccttaaccccacaggagatttattggccgtggctgccgcagtcatatgggccgtgtattccaccctcacaaaaaaaatcagcgcattgggccacggcactgtccagagtaccagaaggacctttttttacggaattctatttatggtgccggctctggccttcatggacttttacgtgacaccggctcagtttactgacatgaaaaatatcctgaatcttttattcctggggctgggcgcatctgcactgtgcttcgtgacctggaacacaggcgtaaagatactgggccccgtaaagaccagcgtatacatctatatggtgccgatcatcaccaccctgacttcggcccttatattaaaagaaccggtaacaataccggctgcattgggaattatcatgacactggccggattgtttttatccgaacagaaaaccacgaaaaaaggagaaccaaagatatggaccaccaaaatgaaaaatgtgtaatggtaatcgacgaggagctgcccaccggcatcatagccaatacagccgggatcatgggaatcaccctgggaaaaaaactccccgaaacagtggggccggatgtatccgaccggaacggaaggtcccatctgggcattatcgcgattccggttcccattctgaaggcaagtaaggaaaaattaaaagagcttaggcttaagctttacgaacccagcttttcagagctgacagtagtggatttttccaatgtggcgcagagctgcaatgactacgacgaattcacatcaaaagccgcccagacagacggcgacagcttccagtactttggggtgggcatctgcggcgccaaaaaattggttaataaactgaccggaaacctgccgctgttgcgataggaaggaaagcacaatgggctgtaataccggtcagcgctgcgatgggaagccgtgaagctgcgtcccactctctgaagaacaccaaaaatcctgtctttcatgttccttctctcttgtctttttcgtcctaccgcaccccctggctgtccagacacaaataaggcactaactgttaagaacactgtctccaatgtcctctctcagttaatgcctgcatcaccagtgacacgcgcttaattgtgcactaattttattttcctttttgtgcaaatatgccaattcaccttttctattccagcgtcagtccaaagtccagctcatagtaattcccctcgctgtcccggtaggcataagcctttccattttcatccttcatggactccggcatgtatttgtccttgtggtacccaggcacgtcgttgcgggatatgcatatgccgtcccggtccacccggataacgctgtcgttccttggaagggtaatgggcatcctgcctgtgggcacacaccttcccatgatgacgtccaaaaccgcgtccgtataggtgtcaaatcctgccagaagggcgtccgcacagggttccacgttccccacttcccaggccagggtgaaattaatattggaaatcacctttccccccctgctgtgaagggactcgtaaatttcccggattctccctgcccccggcagagtggtctcctggtggaaggaatcagccgggcggccctggctgtccacatcccgcacctgcttgttctcacagatatccagttccagataccccttggtggaatggaagtattcgcctgagcttggacggataaacagaatagcgaaatcagcttccctgtaatcctctgtcagctccgcctgaaaccttcctgcaaaggacgttctgaccccgtccgtttccctggctgcagcctccgcttcgcagccaaagcattccacatataccttcctgcctgctgtcttttccctatccaggggaatcaggccctctttgttttttaagagcaccacggactgctgatgcacccggtaagcgtcctcccagtgtttctttgtggctaccacctgctttgctgtctcagggtcacggtatgggttgtcgaacatgcccagttcaaacttttccttcagggtcctggtcaccgcccttgtcagagcctcatcggtcagcaccagatcaccggcccggtacccctggggcaccggatggccctgggccgtgtaatatccgttcctgccgcgctcatatgcttccctggcggaaaatacatccaaggacccgctgatgatatccactccggtattgacagccagcgcgattctggaaggcacatccagctcctccaccccccaggccatcttgttggagatgccggagtcgctgttcacatacccctcaaatcccatctgttcccgcagaagcccctgtatgaaagccctgttaaacgcaaatcctaccggctccatctccatgacatctccgcccggaccatactggggcctgctcttggcagctgacggtttagcgtaatatggcataatggaggaagcctttttctctatggctgtgcggaaggcgggcagatggtatgtgcgcaggctgtcctctgtctggtacacattccactgtccctggacataatgggggtcgaatccgttttccctggctccgcctcccgggaaatgcttgatggtgacagcgactccgtctcttgtcacgccccggctgctcccctgtatgccgggaatcagacgctccatgatggtgcacacagtccccggatcctcaccaaaggttccataggacctctgccatctggggtctgtcatgacatcggccatatacatatacccttttttcattcccactgcatcccattccctccggatacactctgcaaagctgtctatgagttccggtccgctgcctctgacagctgccgcgattcccaaggtcccgggccaggcggcaaacacgcctgccgcatcgttcatgccgaacacaatttccccgtgctcattccgggaattggaaaggaccatcacaggcagggcatggccggttccctctgccaccatgttaagctggttaatccagtccgccagctctcccggccccggattctgacgcaggatgaaatgacgtatacccatttcttttaatgtgtatgtggttccgtaagtcttttccacattaaagatagactcgtcctgctccacaatttcctcgttgagaagaccgctttcatctacctttgtcctgtcctcctggtaaattcccattttccaggaattgacaaacagcatgccgattttctcgtcagcagataactctgccgccagggaagccgcccttacggcgggagtgttgcgccaatccttatagggagccagcctcccatcccctgtcaggtccctgaaatacagcccgtctttttcaattaccggccttacggtaactccgatgacaggaccgttttcatttttataaaaacgaatgttagctgatgccttgttcatatcgttccgttccttcctgcgtttacgctctttctcagttttattacactgctccggcagctgcttcctcagcgccgtccgggcgggttccctttccggccagtacttccttcctgttttccagctcgtcctggatttcagccattttcaccttatccagattgtaccagcgcatggctatgattgtggcaatatggcccaggataggcacgatgcagaaacataccataatggccatgttaaaggtggagtttacaggttcattgggctttatcaccacatttcccacccctgccaacgtcagggcaaatccctgaatcatggcggaaaaggaggatatgattttatcaataaaggagaacatggtccccatcattccgggtacaaagcggccgctgcggtacatttcataatccgtacaatcggcaatcatgggaatgatacctgagtttcccatgctggccagacatttctgcaccaggaacattcccaggaatatggccggcactttggggtcaggtccaaccacaaacataatggccagcataatcatggatccccatgttcccacaaggaaggtgcgcttaaggccaaacctcctggacacaaacacaccgccgatggaaatggctactaacggcgcgatgaggatacttgaaaatacaccctgaagactggaattcagcagcatattggcaaacaggtatgtcatggtgccgctcatgagcagctgccccagtttatccgttgcagcagagataatcagcatctgaatgggacggttgtgcatgacgatatccttgtaatccctgaactttacctttggctgggaacctgcctggccaaagaattcaggccggtcctttgcgctgattccgatgatggcaaggatggtaaacacaaaggatatcaccgcaagaatgacagccgcttccttccacatggcaggatttatcatacccaggccctttccgttctcacccgcaaattcccccaccgaatatttttcagccagtatggtggtgatgagcatgggcacaagagcgctggccatctgggtcagtacactgtcaaacccggcaaatatgggacgctgtttgggattattggtaagcacggcctggcctgccttggtgacaacggtctgacaggtatagccgataatatagataacataaaataccgtggtaaacatatatttcctggaaattccccaaccggacggcgtattgaaaatcacaatcaggctgcaccagataatgatattgcccacaagcatgtaaggccggaacttgccgaagcggccgttggtccggtccactaaaaatcccaccagcgggtccgtaacagcatcaaaaatacgggttcccgtggcaatcaggcccacaatggcagcagccagcccaaggacattctgagtaaagtacgaatactgcatcatcaggaacatggcgatattggtggcgcagttattcagtgaaaagaacccaatctgccataatttcgcgttgttatactgttttacaacacttttattcttctccattatatatagtctccctatgttcacacattttcatttttgtttgccggctttatgtttgtaacaatattctaacacacttgattttaaagagttaggattgtataatattatttagtaatatcttgtcatagttatttagccgattcgtacaatattttattatttttttgtgcaaatcctatagaatatatcattcagggagaaatataatggaagaacatgaaaaagcgctcatatccagacaatttatagaggtcatgctgaaggtccctgtcatcctgtgtcccgggcgaatagaagccatcgaaaccagcatcaaagaatactttccggatttcatcaaaaacagcttcccctttttcataacccgttccatggtggagtccttacagacgggaaccctgtatcacataacggattttataaatcttcattttaacctgttcctgtatggcggggggactcagcttctcatcgccggtccctatctctcccatccggcagatactgccttttgcgagcaaattctccaggataacgggaaaaatctgtccctgcttgtccccttcagccagttctgccttagcctgcccgtagtaggcagctctcagatgctggaagtgatgcggaccgccatgagggtcattaccggcacggaccgggaaattccctatctccactatgaaccgcagagacattacacccaggagatatcaaacctgtcggccgagggtgtggacgaggcatccatggaacttctggaacaccggtactattatgaaaagctgctcttgcaggaggtcgcccagggcagccaggatctggcccttaagtattacaggcagttctcacaggaaagccggtccattgtccgtacagaggacccgctgcgcacggcaaagaacctgggtttttccctgaataccatgctccgcaaaagcgctgagaccaccggcatccatcctgtgtatctggacatcatctcatccaactttgccatgctcattgaaaatgccaacagcatacgggaagcagaggaatgtaaatcccagatgataagcgcctactgccgctttgtccgtaaaaaccgtctggaccagtactctcccctggtccgcaaggccgtcacctacatccgcatccacctggctgaccagctcacccttgcagggattgcaaagggcatccgtgtaagcccctcctatctctcccgcctgtttaaccgggagacgggggactctgtatccaactttatcactaaagccagggtggaaaaggctgccggacttctctcattttccggcatgtctatccagaacattgcgttttatgtggggtttggggatttgaattacttcagcagatgctttaagaaatataaaaagatgacgcccactgagtacagggcgtcatcctccatcggggtgtagggccggctattcttccgcccgcacctccatatttcccacatattttcgctccatctgatgtctggctttgcggttctccacgctgtcaaacacgatggaaaaatcataatcctcagggtacagctcactggctctcacctttagtttcagacgtttctggtttaccaggcgtttttcgcgctttatctggacaaggacatttccggtctgatccgccggcctcacaacaatgccaatctccccctttggaaggacctctacactgtcgcctctggtatacccctcctccgggcctgcggcagccggttttctctttatggggacaatgcagggaaccaaaatccgctccagccctcccggccattgtcttcccggtgatttttccagcggtttttcctgagacgtttcctgcggtttttctctggtcttatatagtgttttctccctggtcttttccagcggcttctccagctctcccccgtctccgtaagcctcagaggcggctgtccgaatcatatcctccggcatgcccagcctctttgcaatatagagagcgcagctgtccccggtctttcccatctccagtctgtataggggacgcaggttttcccggtcaaaggccattctggcgctgatgagttctgcatggcggcccgcatatgtcttaacctccggataatgggtggtgaccaggtaaaggcatccccgaagcctcagctgttccagtatggcaatggcaatccccattccctcagccggatccgtgcctgatcccagttcatccagaatcaccagactctccccggtggcccgctttaatatctccagcacattggtgatatgggctgaaaatgtagacaggttatccagaatatcctgaccgtccccaatatcgcataataccaggttgcgcatggcgatgtccgcctcccggcagggcaggtgcaggccggagcaggccatgagcacaaacagtcccacggttttgatggcaacggttttccctcctgtattggggcctgtgattaccattccccgtgtttctccccccagcttaaaatccaggggcacattggaatcccccggcaggaggggatgcctggcttccttcaggcatatgatgccctgggtattgacggccggttccctggcgtccatctgcgcgctgagctttcccttggcaaacacaaaatccagttttgccagcagagccaggttctccttaaatccgtcctcctccatggcaatcctgtccataagcgtgtacaggatacgcctctcctcgcagtcctcctcaatcctgagtccctctatctcatcctgcatcctggcaatggtttccggctctataaataccgtagagccgctggaggaccggtctatggtactgcccggtattttagatttatactcctttttaaccggcaggcacagccgtccgttcctggtgaccagaaaggattccgccataaactttttctgtgattttaaaagcgcttccgccttatccttgattttttcttccagaagctgcaggtcccggcggatatcccggagtgtattggacgcgcggtcgtccaccctgccatggcggatagctccctcgatttcctccttcagctccgtcataagcctgaggttttccccatagcaggacagcggaatgccataggacattcccttgtccagatatgacctgacccgcctgaccgcagccaggaacatgccgatttcctccatctcctccggcgtaagcagctcgccgcggacagaccgggccacaaactccgccgtatgttccatggccggcataggaggcgtgcccgccagctctagcatctgcctggcctgggtggtgtctctcatgcttcttcgcagttccccctcttccatgcagggcacaagccccctggccatctctctggcctctgctgaattggcaaggtctgccagctgttctcttatgatatcaaatgcaactgtcttatatgcttcaaatgttccgttcattgttctgtctgtttcctctctgtttccttgtttatccatgttccctgtagggaatatctgacaatatcgaatcggtttcaaacataaaaatggaagacaaaaaaaacctacggacatccactacaggcaatgtcgcataggttccaaacgataccatatgattcatctgtcatggattccggagtacacaaaaccaagcccgccgggcggacaatcatttcatgtacacaatcggtttatttatcttccacaaacagacacaattaacaaaaagacacctcgcttaaatattactgcatttgataatagcagatttaaaggctccagtcaacatttttatttcaaattgtgctatactaaattgtggctgaattgtgccatacgaaaaggacaacaacaatccggaggaatgactgacatgccttttgtttcacttatcatacctgtctacaatgcggaaaaatatctgcggcgctgtctgaacagcgccatggaacagaccttccaggacatggaaataatcgtagtaaatgacggaagccaggataccagcctggaaatctgccgggaatatgaaaaaatggaccgccgcttccgcgtcatcaacaaagaaaataccggggtatcggacagccgcaaccaggccatagagacagccagaggcgaatacctgcagttcatggacagtgacgactggctgaccccggatgccacggaaagctttgtccatgcggccaggaaattcgactgcgacctggtggtttcagacttttaccgtgtagacggggctgtgtttacggaaaagcagcacatacgtgaacggggtcttcttaccagggcccagtatgcggaatatatgatgcgggaaccggctgacttttattacggcgtactgtggaataaactgtaccgccgcagcattgtgcaggagcatcagctaaagatggatgaggatctgcgctggtgcgaggattttttatttaacctgaacttcatccggtacgccgggcggttcacggccatccagactcctgtttactactatatgaaacggaagggcagcctggtgagcacggactggaaaaaggccaatacggtaaagctgaagctccgtctccttaaggattataaagaattgtaccagagcatggacctttatgaagaaaacaagctgaagatcaacgcctttgccgtatccattgctaaagacggaggaatcggagcccccatgagccggctcaggaaaaagctgagcgaggaggattacattgaagatgagcttccggcaggctacacccgggtgtgccacacgctgggtcccatttacgatgaggcatcccgcatactgatacttggaagcttcccctcggtaaaatccagggaacagaatttttactacggccatccccagaaccgcttctggaaactgatggcccgcctgtttgaagaacctgtgccggagaccacggaggataaaaagggactgctgatgcgccatcatatcgcgctctgggacgtggtggctgcctgtgacatcaagggctccagcgaccggagcatccgcaatgtgatacccacggacctaaaccggattctccgcacagcccgcatcgaaacaatccttgccaacggcgacacggcctttcagctctaccgcaaatactgccgggaaacaacaggaagggaagccgtcaagtgtccatccaccagccctgccaatgcatttttcaccctggaccgcctggccgaggcgtggggccgggagctgttctgacaaagcaggtgcaaaacccggatccaaattcccccaaaacgtcccaaatactcagatttttcttgccaaaggcatataaaacaagtatgatggagatacacctgaacataattattcaattataattatatattgaaggaggctgtacatgttagataaaaaggtagcagaactgatcaacacacaggtaaacaaagaattttactccgcttatctgtatctggattttgccaactactacaaggacgcggagctgaacggcttttccaactggtaccaggtccaggcccaggaggaacgtgaccacgccatgctgttcatccagtacctgcagaacaacggagagaaaataactctggaggccatcgccaagccggacaaggtgtttgaggacttcaggggacctctcactgccgggctggagcatgaaaactatgtgaccgggcttatccatgatatttatgacgccgcgtactctgtcaaggatttccgcaccatgcagtttttggactggttcgtaaaggagcagggcgaggaggagaagaacgccagcgaactggtaaaacgctttgacctcttcggccatgatcccaagggactctatatgctggattccgaattggcggcaagggtttacgccgctccctcactggtgctgtgatggggaaggataagtacatatgtccctgctttaaggtgacaaaggacgatatcaagaaagcaattgaagaaggtgctgattcctttaagaaagtaaaaaaagccacgcatctggccgcgggatgcggccactgtaaatgcagggctaagaagtatacgaaaaagcggctgggtaagatcaaataacattcagtttaaaagcgtgtcctcacaccggaatatctcatgggggacacgcttttttacgtatcagaccctctcagatgcaggccgaaatcatcctgaaaaagtggacattcccaaagcatttccccatttcgtgtaattcaacaacggacggcatctcctgcgggttccatatctcaatcacaaatgtggcgaatccgcacggtttcacatagatgagttcctcaagcgaggacggctggtgacagcagggcatccggattcccaggtatttaaatgcaatgccgtcatatgcggtgtccatggccttctgccaaaactccctatccacttcacgtccgcaccagggacaaaatatgtgctccaattctcctgcgcagtcaatgaactgcacgcttttatagttggtaaatgtaattctgccgttggatgtcatcttaagcattccggcagcacgttttatctgatcatccgtatatttaggataatagtatctgggaaatattttatatatggtatctgacatcacgttacctcctgccaggacctgccgcaatcttacatatcaatcttccggtccttataataatatatccggtcccgttcccctatctccctgagtacacggcatgggtttcccactgccaccacattggcggggatatccctggtgaccacgcttcccgctcctatgacagaattatccccaatggtaacgcccggcaccaccacggctcccgcccctatccacacattctcgccgatatgcaccggcatgttgaactggattcctttcctgcgaagccccggttccaccggatggcctgccgtggcaatggtcacattgggtccaatcatacaatgggagccaatgtaaatctccccgtcatccaccagtgtcaggttaaagttggcatagacaaaatcccccatatatacgtgtctgcctccccagttgctgtgaagaggcggttcaatatagcagtcccggccaatggagccaaacatctgctccagaaggctggtgcgcctggcgctttcccttggcctggttgcgttgtaatcatagagcagctccataccttccatctgttccttcagaatatcctcgtcgcccggaaaatacaggcgtccctcctccatgcgttttgctgcgctgtcaccgtctcttaccccgtctgttctcccgtcctgattcctttgttggtttctctccgtctccatccaaacgcgcctccctttccacctatttcccagctatgggaatcattgtactatattaccgctggaatgaaaagcaaaaaagtgcactgcttcacgtccgcctcactttccttgcggcagctgcgcgtggggccctccgggtggcggaagggggattttaacatatctttcgttccacagccagtcccccctgggatgcgccggacagggccacttccccgtcttccagacggtttaattttctgaataccgctgccatgcacagcactgccgccccaaaggagattacatccgccgccgggccggagtacagggcgcctgtcaccccaaaaaatcgcggcagcaccagagtcagaggcacgcttaacacaaagtccctgagaagggacagcagcatggagagggcgggctttcccatggactggaggaaaatgctgcatgatttctggatgcagcagagcacaatcccccccaggaaaacgcggaaagccagcactgcgaattcattgtacaaaccgtcctcgctgccgaatacgctgataatctgcaccggaaatacctcaaaacatatcagtgacaccaggcccacactgaactcagctgccatcatggttctgaaaatcagcttcaccctgcgccataatcctgctccgtagttataccccacaatgggctgggccccggccgcaatccccaccacaacagaaatcacgatctggaataccttcataacaatccccaccacagtcattggaatatccgccccatattttgacccggccccgtaaattaccagcacattgttcataaccgccatgatgaccacaatagacacctgggtcaggaaactgctgattcccaaaggcaggacatgcttcagtatctctgcgtccggcttaaagcttacgcgcttcaggcggaaggatttgggcctaaacagataataaactgccaacagggcggatacaatctggccggtgatggtagccagggcagctcccttcattccccatcccagcacaaagatggccacagggtccagaaccacgttgagcgcgcagcctataagggtggaaaacatggcaaactgcgggctgccgtctgcgcggataacggaattcatggcattggcaaacatgaaaaaggggattcccggaatgagatataagaaatattccctggcatatcctatgttgttctctgttgcgccgaacccccacaagatactgtctctgaaaaaggcgtacagcagggtaagaacgattccggaagcagtgataaagaccactgcattgcccacgcttctgtgtgcatgttccccgtccctgcgtccctggcagatactcagataggcagcgcatccgtcgcccaccaaaagagacagggacagggcgatgacggtcacagggaataccacgttggtggcgccgtttcccaaaaaaccaatgccccgtccaataaatatctggtctacaatattatagagggcggacaccagcagcgacatgatgcagggtatggaaaatctcagcatcagctttccgatggattcttccgccatatattggtttgtattttgattcatattaacctccgtttttttatttgcgcaaataaaaaagccgcaaccttccgtgaatggccttcacggaaaaagttacagccatattgcagctattactataccatttttttcagaacactgtaatacccaaatatacacaaattttggagtcatatacattgtgcaatttttatacaacgtggggtttttatacacacttaggtcagtttacaaggaactacacgcagaccgtgaaacgggctgctgacaacaaacggcgctatgcgccccgataggggctgcatggcgccgctttgttgtgggggaatccaaagggggcaacgccccttttggcacacgaccttgcttgcaaggtgtagtgtgttatacgctctgtcggcgttgccgtttcaaatgccgttgccgccgtggagggcaagggcgtttgaaacggcaggaaaacagggctgtgcttgcggggcgaacgccgcaagcgcagggctggtttcatcagcagacagggcgtatataaaagccccccgtccctcgtccgcttcctaacttgtggacaaaatgtcccgaagtttggccacactcccggaaaaatagcaggacagcaggcaaccgtcaaggctgaaataaacgggcttgcgcccggccttgactgccgcccgccgtcccgctgaaagggtagacaaggcggacaatcccatactgtgcttgtcggcagactatcaattttaccggaagtaaatctttcccaaaatggcatagggcaggaaagccacaagggggctttcctgccttgattacccattagcaaagacgggcgagccagtcaacggcggcgctgtaagcgccgttcatcttgaccgttgactggctcgctcgtctttgctatttccctaagggtgcgtcttatgccaataatgtgcatttaatcagaccgacaaactgggatttattcaaccgaataggaaaaaggcagaagtgtttttgctttgattttttttagctctccatctactgatacaatgacgtcacaatccggcatatagtcatgcaatatctggcggcagtttccacaaggcggtatgatttcctcaccctcttttcctctaaccgcaactatagcgtcaaagttcctttctccatttgtaattgctgttcctattgccacttgctccgcacaggccccatgcaaagaataaagatttacgccaacatatactttgccgtttttacaacgtatagctgctcctacagtatgattacagttctcttgatcgtagtttagacgaattgcttttttcgcttctgctattaactcatagtctctttcttgtaataaattcatatgcacatctcccaaaattcaaatttgtcaagtacgccttctaagcctaaggcatacttgtcattttcttttacccctctgtggtacatagcttttcgccagttcggatttttggacaatccgggtcagccattgtttttcttcctctgtcagcttgttgtagcgcagctttgtctgcttgcagaacaccatcagcagttgttccgcccggctacccttgaagctcgccacttcctccaaatcccgcttgagttcgtccacaatagtattctctggggcgctgtcgcttctgcccctgtgggcttcccgtatgtcctccatgatagcatctatgtcgtgatgtacccggctgctgaaatagtcgccctcccgcacatgggcggcttgcagcacaccggcggttttgtcatgctctcccggctggtacttctccatgatttcagccctcgccacgtctacccatgcgttcaagttctgtatctgtgttgcggcgataccctccacataaatctgtatatcggccagcagcttcacaaaatccgggtgcaccgccagttcgcaaagcagtgcggtgtcaatgcgaccgcttttcagcaggtctattatctcgtcactcaaacgcaggtctgcaagatcggcgtttgggtgactttttgtttcggtcagccccagcaggtaatcggcggttacgccgtaaaacctcgccagcttgataagggcatagtggctgatgtctttgaagtcgtccgcttcatagctgcccagcgcggacttggaaagcccggtctgctccgcaagctgctccagcgtcaggccgcgctccacacgcaggtcttttagtcgttcttgtattgtcaacgccaatctgcacacctcctctaatgcttatttcatgctttcttggcactcgctgcactctctgtcatggatagaaatgatacccccgcattttgggcaagtatatttctctttctgctgttccatgaacctttccaaaccgtgttgacgaacaaactcgctattctccataaggcttgcctgataccttttgttgtagcttttttcgaggttttttatcagcttgcatggatagtcgggacactcaaaacaataggacagccctttgcccttgatacaatcttttatcttgcatttgcggcagtgttccggctttcccatatcactgtttaagcaacctgcacacggctttttatgataacaatgtttatagcagaccaaacagttcatgccgcaggaggcaaacatggccgtatcaattttttcagttggcattttcatggctcgtcctccttgtcagcttactgttcctttcattttaccacaaatccgagagcgtggaaatagtgcgttttccagtcagatttccaacctttcggatatacgggacgggcggtcaaaaaagtgtagacttgtgttagttcatcgatggacaatcacaagtgaatgaccgtccgaaagagatattaccgactggggaagtaccgccataacgccgcaacttgtggacaaaatgtccagaagtcacttcgggccaagttggcccgaagcaggtcagcgtaccaacgccgggacacgccgccgggagggggcaggaatggctttcgggagaacggcagaatatgaaaaaagcggaggaacgcatgagcaaaaaactaccagagatagagcgcacgccgggcggcggcttgccccgtatgaccccggcacagcgcaaacgggcaaacgcccttattcgcacaacctgctgtaattacaacggcggcaactgcctattgctggacgatggggaggaatgtgtctgcccccagaccatttcctattccgtctgctgtaagtggttccgctgggcggtgctgccgcaggacaaggcgctggaagcggggatatttcgcagcgccagcgtaaagcggtgcgccgagtgcggggcggctttcgtcccccgttccaaccgggccaaatactgcccagagtgcgccgcaagggtacataggcggcagaagaacgccagcgacagaaaacgccgcaggaacacggacaaataagggccaacaaaagcccataaatcaaggactttaagggcctgtctggggcggggctgtatgtttgtatgccccgcccccgaaacagccctcgaaatgtccgcaggagggaggattgatagattgccgcaatacgcaattctgcgatttgcaaaacacaagggcaacccggcaaggccgttggaagcccatcacgaaaggcaaaaagaaaagtattccagcaacccggatattgacacgacaaagagcaagtacaatttccatatcgtcaagccggagggcaggtatttccattttatccaaaaccgcattgaacaggccggatgccgcacccgcaaggacagcacccgatttgtagataccctcataaccgccagcccggagtttttcaagggcaagtctccaaaggagatacaggcatttttccaacgtgcggctgacttccttatccagcgggtaggccgggaaaatatcgtgtcggcggtggtgcatatggacgagcgcacaccccatatgcacttgacctttgtgccgctgacgaaagataatcgcctgtgcgccaaagagattttaggcaaccgggccagcctttccagatggcaggacgattttcacgcctacatggtggagaagtacccagacttggaacgcggcgaaagcgccctaaagacgggccgtaagcatatccccacccggttattcaaacaggccgtgtcgctgtccaaacaggcggcggccattgaaaaagcactggacggccttaccccgctgaacgctgggaggaagaaagaggaagccctcgccctgctgaaaaaatggttcccgcagatggagaacttctccgggcaactaaaaaaatacaaggtcacgattgctgacctgctggaagaaaacaagaagctggaagcacgggcaaaggccggggaaaacggcaagctgaaagaccgcatggaacgggcaaagctggaaagcgatttgcataatatccagcggcttgtagagcggattcccccggaggtgctggaacaggtgcgccgggaagaacatcaaaacaggcggcagaggtaaccgccgtaccttgaaattttaatatcacaggagggcctatggagcatagccgatacaaaaaggaaaccgaagtcgtaccctttcagggcaaagaaatcattgtggaaaacctgtcgcccatactcacgccggaacaggaagcggcgaaacgccgggaactggagcagcaactttatgacgtgttccgcaaatacgccgacaagcggcgggcgcaggaagccgggcaatagggctttacatccttgatgtttggggctgctggcggtataatataattgtcagcagctccgtttctttttaagaaaaggagcgacaaatgaacaatcgaatagacgcggtttatgcaagacaatcggtagacaagaaagacagtatttccattgaaagccagattgagttttgcaaatacgaattgaaaggcggtagttgcaaggaatacacggacaaaggatacagcggcaagaatacagaccgcccccattttcaggaactgatacgggacatacaaaaagggctgattgcaaaggtcgttgtctacaaacttgaccgtatcagccgttccattctggacttctccaacatgatggagttgttccagcagtatgacgtggaatttgtatcgtccacggaaaagtttgatacgtctacgccgatgggccgggccatgctgaatatctgtatcgtgttcgcccagcttgaacgggaaacgatacagaagcgcgtcacggacgcctattattcccgcagtcaaaggggcttcaagatgggcggaaaagccccctacggctttcatacgaagccaatcaagatggacggtgtcaacacaaagaagctggtggtaaacccggaggaagcggcccatatccggctgatgttcgagatgtatgcccggccggaaacctcctatggtgacattacccggtactttgccgaacaggggattttgttctacggcaaggaactgatacgccccacgctggcgcagatgttgagaaaccctgtttatgtgcgggcagaccttgacgtttacgaatttttcaaaagtcaggggacggtgcttgtcaatgacgcggcggatttttccggcataaatgggtgctatctgtatcagggccgggacgtaaagcccgacaaactccacaacctgaaagaccaaatgctggtgcttgccccccatgaggggattgtcccctcggagatatggctggcgtgccgccggaagctgatgaacaacatgaaaattcagtcggcccggaaagccacccatacttggctggcgggaaaaatcaagtgcgggaactgcggctatgcccttatgagtatcgtcaaccgggtaggccgtcaatatctccgctgtacgaaacggctggacaacaaaagctgtgccgggtgcgggaaaatccataccgccgaactggaaacggtagtctatcagcagatggtaaagaagctggaaagctacaagacactgacgggccggaaaaagacggcgaaagccaatccgaagattgccgccctgcaagtggaacttgcccgcgtggacagcgagattgaaaagttggtggacagtttgacgggcgcaaacaatgttctgctctcctatgtgaatatgaagatagcggaactggacagccgcaagcaggaacttgtgaagcagatagcggaactgtccgtggaggccatcagcccggagcaggtcaaggaaatttccggctatctggacacatgggacagcgtatcctttgacgacaagcggcgggtggtggatttgctgattaccaccatagccgccaccagcgacaagctgaacattacatggaaaatctgacgggcagaacaccacccgtcagaccgttaccctatgtagtcccttgtaaactgtactttcacttcatatagatacaattcacttttctatcggaaaataccggatgaaccggtaatgactccgttccattccctctctctcataaaagcggtgggcgcccagccttgtccggttggtgctgacctcaaaacggacgcagccggcttcccgggcaatgtggtacgcctcctgaaaaagcccatggccaatcccctgggagcgcatgctgtttctcactgccagctctacgatttccccaattttgccgcatctgcacaacatggtgcctatgcgcagatttaagactcccgccacctctctatccatctccgccaccaggcagtgcattttgtcatccttcatataatccctgtatgcctcatggaatccctccttgtccaggctcattccctccagctcacagagcagttcatatatagcattctcatccttttgcgttgcataacgtatcacagatataccacatcctttctgtgaaccattgtaccacaaaatgagtcattccggtaccggtttacgcagtgcgcctgctggggtttgaacccaggacctgccggttaaaagccggttgctcttccatctgagctacagacacattcttttctcttttctcaaccagccgtcctttcatcaccgcactcagccaccagtatgtcattcaccgattctcccagaagcagactcagcgcaaacatattgtccaggctgggcagtgtgtctccccgcagccacttgtatatggcgttggtggtggaaaatccgaaatagtccctgaggtacgggacgctcagtccctttgactttctcaatctattaatcctccggcctgtttccaccggatttatgactggataattcatcttcgtcctccttttttgcagagggcggccgacgggatttgaacccgcatcatccggaaccacaatccggtgcatttccatatctgccacagctgccattttccttatatgaaactaaaaaaccgcctgcccatacggacaagcggctaaaggaattcagaagatgattcatctaaatgaacggttcctgaatatgcgcataccataagggcatccaaacaaaacgctgtttgtgagcgtctttctgtacgtgatgtttatggcttttctgcgcgtctaaacggaacatgtcatttcctccctttctcattttatgccttgattctagcatggattttaccggatgtctatatacctgtggtatacagacaggcttgcagacgggcttacggcaggttattccggcagatacatctcgtcctccatccggcagaagccgtaccgctcatacagcggccgtcccatgctagtggcctccagtgcaatgaaacggatgccgcgtccccaggcttcctgtaccagcaaatccagtgttctcatggcaatgccttttctcctgtactccgggtccgtatacatgttcatgatataggccttcattcccgttggattatggtatgtgggcatgacctgatagaagctgattcctctggttccgataatcaggtccccgtcgtatacaagataggccacatggcttccatcctccagacttttttcataataagtccgggattcctgttccgtctgtcccatatcctccgaaccatccagtttgtttgccgccctcagaacctggattctcgtcttaaccaggtcctccagcttttccattcccactttttcaaaacgcatcctactctgccttcctttggtttcttcctgtttttttgatttaaagcccctgaatcgtcatagaagcatttataagtgtctatatgaagtgcttgcttttaactaagggaattatactacaatccggagaagtcaacaagaacaaggtaaaccttgcagccggagcagccacacagcctgtctctgatattgcggatatagtaatacgtccttattgtaattgtggcggtctgcaaaattgattggatatgagcatatgcggcatagtattcattgtaacagagcatattatttacaaaaattttgttgctattattcgtatgtccgtatataactagagataatacgtatgaaagtaaaaaacaggcaggagggcaggcatggagttcaacgaaaaactgcaacagcttagaatcgggaaaaatttaacgcagcaacaacttgcagagcaattatatgtatcacgaacagcaatttcaaaatgggaaagcggcaaaggctatcctaacattgagtcactcaaatgttttccagatttttttctataaccatagatgagctgctatcgagtgaagaattaattacccttgcagaagccgaaaaccactctaatgttaataggattcataacattatcagcggaataatagatgtactggcaattgcacttattgtattaccaatctatggagaaccccaaggcagccatttttatcatgtaaatcttctgtcaatcactcatttatcaaatatagatattggaatatattgggctatttatttactcataattgggtttggaattgccagacttgcttttatctttttgggtaaagaacgcttgtgtggcattatctcaaaagcttctgctgcaacaggggctgcggcaatctgtttatttgctgcggcaagagaaccatatgtaaccatactgctatttttgttttttgcagtaaaaatatttttattgctgcagcaaagcaggacaaaatagtcatacatcctttaaaaacaagctctgacacgattggtgtcggagctttttctctattgtgacggtaggtttcttgtgctccgggctacatggatagataatcaaggggagccggcaagtaatttatcacagcaaaagaaaggaatgtatactatgcaaaagaaatcaaagaaatgtatcatcacaacaggaattctgtttctgatttttatgctttttactgttataatcaagaccattgatgtacagcctgtcggaccggagcagtctacgataggactggcttctctgaatcagtttgtatttaacctttttggagtgaacctgctttggtataacattactgactggttaggtattgttgccatagtaattgctctggggtttgcaatcctaggactaatccagctcatacagcgtaaaagcatttggaacgttgatccacgcattctattgcttggtgcattttattttatcgtcattataatttatgttttctttgaaattgtaatcatcaattatagacccataattctctcccaaagtttagaagcatcatttccgtcctctcatacaatgattgtaatttgtattatgtccacagcaatgctgcagtttcattattatttacgtgacaaaaaagtttgtctgtggacaatagatatagcttctgttttgatgattgcagtaacagtaataggacggcttatatcgggagttcattggtttacagacatcgtggcaggcattttactctcatcagcgttagttgctctctattattccaccctaaaatatatagaggaaaagaaaggctggaataaataagcccgtatactgccgcacgacgcagaaccggtatacaggctctgtctgcttcccagggtgccattctgtcctgtctcactgacagcaggttgtatcttcacggtattcctgagcctggccggactggcggcccgttctcccctgctccatctgatacatccaccggaccaggcggccggacctgcccgtccttatcttaccattaccttcccgggctttgccaactcctttgtaggccacggcaggatgctcataccggtcataggagccacgggccatatcaccctgcgtggcgttctggtggatattatggttttggggatatcacatgaagaagccttaccggtcccagaaggcctgacacataattccggctgtcccggtccatgttgtcctcgttccagtaccggttccatcccagggccattccctcgtccaccagcatgtggcgccgttcattggaggccaggttggataccaatatggtaatctcattttccccgggcctgagcagggaagtgatgtccgccctatagggacgccacagccttgtatctgccagcctgccgttgatccagatttgggcacagtggtttaccccgccaagctccagcatgtacgtgccctccagttgctccacggaccatgtgtttgtatacctgcaccttccggagaaccacggaagtccaagcatacgccagtccgaaagattgacagcaactgccttcatggttacgcggattggctgtttcagaccgtcgctgcatccgcctgccgttatctgtatggtgagtatgtgaatgcgctcattgtccgggagtatgtgtacgccattttcccaatgcacctctttgccgtccagcatacagaccgctgctccggctgtaacaggctcatatagaactgacgctccggcaggtattgtgactgtataccagagctttctgggataggtcagggtctgcccaaataacggaaggtccccccatggcttcaaaggcggttttcccctctcccaggctttcagccacacatgctccagacctgtataattgaaattcaggaccttccggacatcaaagccggctgccgtaaaccgcccgtccgaatccggctgttcccaccctttaatcagactgtcatttacaatccaggtgctgtcacttttcacaacttccacgtttgttccctgaacgatgattccttccataagaagggaaataaaccggtctgggggcagctcctctgcggagcagacatatacatcatgaagcgggttgcggtttgttacatggaatgccagaatattctccccctgggtcagctggcccttatcaccaaataccaccggctctccgttgctgattcctttgtaaaccattgtcccgttgataaagcactcaaaggaatccaccgctgccgcgcagaactccgccttttcaggcgcatgttccaggaataccgtctttctgaaatacagatccgatgcatccagctggtcattccagcttcgtctgcgtgtaatccaccgtccattccaaaggctcatatggcggccgcagctcccctcctccccggattggttgcagatccggatggtctctgttccggaggatacatcagaggtgaattctgcaattgggatttccagatccgtactctcttcattgtgtgcgttatctccatgattcgggccggacggggaaaggggaagaaaatcccattttcctgtaatccactcttcctcccaccggatatcccccgtaagggccggttttgcctgtctgattgtatcttcctccaaaccaaacagtacgtagacagcttctcccggttccaaatccatgtatatcaggacaccgctgcctgcctgacggcctccgcacatttgggcggtgcctgcctgagtgtatacagcctgcaccatatcccctttttcaatatccaaaaggaccggtgtagaagcatggctgaaagacagcaccagattacgcctctcatcgctgctgttggccaccagataatagtcaacattccctgccgttctatgattcaaaaagatgtttccggtatttccgtaaatcacggatgcggacggcgcagccagtccggctgctgcttccggaatacggctgatgctgtgtacatttcccctgaggaccgtgtcccagtatccgtttacgctgcatccattcgccctgtccccgccagccctgttttcgccggaccgtttttcgccggaccggttttcgtgagccagaccggtcctgtaaaacaggacgctgcctccggcctttgtccatgcttccagctttgccacggtttcttccatcaggcttcccccttccggaaggaggagcactttaaaacgctgctgccccaggcacagctttccgtcacatatatgagcatttaaaatggattcctcgtccaccatatccgtgtccagctggtgctcaatcatacagttgagggcctggtggaatccgttgtttatggcctgacctgcgggattttcctctccgttctccatattttcatccatgtcccctatgggatacaggatggcgtaatctaccacaggatttccctggctgttcatgaaggatagacgccttatgtagtcggcaaatattttaaaatagtcccagtaaggattctgatagaaaaaactggtgggccagtcactctgggaaccctggtggtcacactcgtagtagaatccatggaggatgaacatgccggttcccatggcggccagagtattgattccctttttaaattcctccatggtgcagttccatcccgcgcctcccagggcttccgacatagccctctcttttccatatattctggccacggacacagaatacttgggctcgcagtatgtaatccttctgggataccggtaccggtaatcgtggcagtcagagcccggcaccatgagatggcgcatggtcttaaaataatcgccctgccttctgggatgttcccacaaaaactcctctgtgtggcctgtcagcttaagaccgtatttcccgcaccagtctgatatctgcctgaaaaacgcttcctcatacatggcggttacgagggagaaataatcctttcgcacctgtttgtcccgctcagacacgccgtccacaagagaaggaagctcgtccagtatgtcataaccgtatgtctcccggaaccgtccaggcagccggtccgtccagggcaggggatttcccatcatgtagatttcgtcaaaaaagatacccggtatcagtttcccaaaatcctccccccaccgctttctgtattcctcatgggtcagttttatgaaggaggcaatggtttcgggattcagatagtccacggccttttcaaatactttttcataaaactcatagataaaaccatctcttttaaccacgcggtacggcattgaggacggattggcgccgctttgtcccttatcctccgggttggcggcatccgggttggcgccgccctgatttccgccgccctcatttccgccgccctcatttccgccgccctgacttccgccgccctcatttccggcaccttcattcccgcagcccctattcccggcatcttttttcaccgcccagagtccctttgccatgttgtcccttccccgggacagtatcctggaaggcttttggaatccataatcaaaggtactacctgcggtgccgctgggccaggcatactcgtcgtagagccagggagcaaatccctgtttcctggactcctccacacagaccccgacagcgtcccaccactcatcctccagataaggagtcttaaggtaggccctggggtgcataaagcccccgtacacgcctttttccaccatctggccaatctgccaggccagacgttcctttttcagttccccgtttaagaaccagaaggccagcacgctgtattcccttcccgggtccttaaaatcacgaatcaaatccatacccttcctcctatcccttcaccgcaccggcggcaatggacttaacaaaattcttctgcatacacaggtataccaccacaatcacaagagcgctgatggacagggctgcaaacacaggagtataacccactgtctccgttttcttattgaacagggccacacccacagaaagcgtatatttgctctcgtccgtaatggaggtcagagcccacaggtattcattccacacctgcatggccgagagaatggccatggtggccaggatgggctttgccaggggcagcatgattttgcggaacacctgcatgttgctgcatccgtccagcttccccgcctccattaactcatcgggcagatcctcaaaatagttccggcagataatcagtcccatgggagcaaacccctggaaataaggaaataccagggccggaagggtattgaccagatgcatccggttcaccatggtaaacatggggagcagaataatagccgtgggtatcagcagattgaagatgatcatgtaataaaagaaggtcttgcccggaaatgtaagctttgcaaaggcatatccggcgcaggtgacaaacaccaggttcacggcagtggttaccagggtaaccaccacgctgttcatgaaataccgggacataccggcatcgttccaggccgtggcatagttttggaaattgagcctggccggcagggtccagatactctccagaaactcagtctctgtcttaagggactggatgaccacccacaaaagggggtatacggatataaaaaatgccagcagcataaaaagaaacagaaataatttatatacatttttcttattcatcatgaagtcctccctgcccttttcttctggacaatggttttaaccgccataatcgccaccataataagcatcagtatgacggaggcagccgtaccagcgccgaagtccctgtttgtaaatgcttttgtgtaaatataggatgtcatgacgtcggaggcgcctcccggtccgccctgggtcatgacccatatcaggtcaaagagcctgagtccgttggttacggtcagcatggccagcaccgcgaaggtgggctttagataggggatgataatgtaaaacagcttctgccggaaattagcgccgtcaatctgggccgcctccaggaaatcctcaggcatttttgtgatattggcatacataatcagcatattaaatggctgggagcgccatatccaggtaaccgcaatggcccatagggctgtctcaggacggctgagccaggcctttgcatactttcccagtcctgccatcttaaggaactggtccaccggtccgatggttgggtcatagatgattctccatatacatcccaccaccaccatggatatcagataggggataaacagacccgcattgaagattttcttgcccggtacgcccacatacaggatataggcaaacacaaacccgatgggaatggcaagaaagctgaccatgataaggtaaaatgtgttccacagggaacggacaaacttggggtccgccagtaccttggcataattcttaagccccacaaaatgttccagggctcccagaccattgtacttgtaaaaactggtctgcagcgcgtgaacaaagggtatgtaaaggaaaatgaccatgacaatgatggtgggggcaatcagggccagcgctgtcatcatttcctttctttcttttaatgtttgggatgatttcattgttatatctcctcctattgggacgggcattgccagatacggcgcaggaacctgtgcctgttcctgcgccgccttgccttacagcctgatttccgggctatgtctggtgaaactgcctgtgatgatgctgcctgcggttatgctacctgcggttatgctgcctgcggttatactgcctgcagttataccctgtgtcagttcaggttggacagataggtctcctcatagagctggttcagctgatccgtcacataatctatgtcataggtgcctaataggtaattgggctccagatccgtcaggaacgtgttctggatttccgtggttatgttcacaggcacgtagatgtcggggatgaaaccgtttttgcctgcatcaatatatcccttcatggcctcgttgtcgcttgtcagctcaaaattggtaagtccggggttgatgaactttgcgtaatcttccgaaaacgcagtcttggatgtcatgaacttcacgaactcgatggcctcctcctggtgcttagaggaattggtcactgcccagatactgctggatccgcccagacatctggctggctttccctccacgcccggcagggcataggaagccagctccactccctcaggcacattttccgtcaggtaggaaaggtagttcggctgcagcataacctgcaccagttccttctgcacaaagagctgctgcatggtctccctgttgccggtaaggcctgactccgggaaccatccctggtcccacatatatttgaacttttcaaggccctttttcacgctctcagaagaaaaggtcatggaaccgtcctcaaaggcgttgggattggcgtccagctcctcacggcagtactggtcccagaagattctcggccaccagtccatgttctgctgctgcatggatacaggaatcttgcctgctgcctttatggcctcgcagtttttctcaaactcttcccatgtggacggcacattcagtcccaattccttatacacattcttatcgtagataacggccaccgtagtcatggtaaagggcacgccgtacagcttgtccgcatagtcggaaccaattgccttaagggtagccttacagttgcttaacagagtggggttgatcgtctctccccagtttgcgtccttctcataattctgtccgttttccactgcgtcagtcaggtccaccagcaggccgctctgcacctggtccccgatgaactgggagttggtcatgaccacatccggcagttcgtttgccacattcagcgccgtaaatttagaatagtaggagtccgatggaacatactcatactcgatgtttacttccgggtttagcttttcatatacggaaatcatctcctccaccattcctccgtaattgtccagtacctttatggtaacctttccgctgccgtcccctgctgccgctgtatttccctcaccggatgctcctgcatttgaagaagcgcatcctgtcatggctgacgcggacatggccgcacaggttaaaagcgcaatcattttcttattcatcataatcctcctatacactatgttttctctctgtttatcctgcttttctaccatttcacatatgctgcaagcttgcatgttcaatttgtacagcccaatcatacaataccgcagtgtttttagtcaatttgcaatcaatgccggaggaatactttcgtgtttttctgagttgtactttcattccgggatggtactttcttgttatgaggcggtttttcccttattttacgtgcaaaaaggaagaacagaaaacatctgtctgctttctgctcttcccggattactttccgctatttacgttttcccgataatgttccggaccctattccatataatctaaggggtccaccgtcttatcctgatgcttcagctcaaagaatacattgacgccttccacggaataatactttgtaggctctgacacatagcccagggtctgtccctttttcagatactcgccctctgccgcgcagacttcctttaactggccgcaggtggctgtgtactcattgccaaggtccatgacaacgtaatttccgatttcctcattggagccaacttccagtatcctggcattggccggggcacccaccggagtactcacatcagactggattacaaggccgggattgcatttgtactggtccagggtagggaaataaatggtctggtccatgctgtagtccagaagcacatttcccattacaggccattccatcttgctggtatctgtaaaattcagcaccagcgcatcagctgcatcctttcccgctccagcttccgccgccagatcatttccctggttggcgttctgggccacggctgccttggtaggagccggctcgctcttttgtgtctcttttgccgcatcggaggcacctgccacctgcggcatttccggtgcggtctcctgggcaatcatttctggctggggcacttcaaggtatggattcgtctcattaccttttcctctttgtacggtaatcactcctgctgcggctactatagtcagcaggcctaacactagcatgacaagaaacagcttatccttgaacatctggtttactttctctttcacgtttatcacctcggtactattcttaccaaaccaaggctacttattcagaaatgaaagcaatatttttataaaaatatccaaggatatcttcggccttccatccctcctttgctttctcgttagcagtggcctgactcagcccgtagccgtgcccgatacccttcaccactgccctgattccgtcctcatagggctccagcacaaagcaggaggaagccaggcccagggcatactgtacctcctcgcctgtatagcccgcgctgccaatctgcacggtatccacatacccggcatcgtccctggacacaatctgtatggtgtccggtacctgggatgcctcaatggtcctggagccggattccccggccggtatgctgttgatatccgacacaaacgactccctggaaaaggaaagcatctgcatgtatccctctgcctccacgtccccgggacagtccacggtctggagataaggatgagtaaaatccccctgcctggtcatgcccgctgtggccctgcaatacatggggtcaatgcattttccctcgtaggtcatgacaatgccggaggtggccttgaccgcgtcctccagttttttgtaatattccgggaaccggctggaaccccacagcttttttaactggtccgcctccagataatccatatccagggcggattccgctatctcctccccatccccggtgccctccatctgcctgcatatgtatgtcctggcaataatggcctgggctttcagtgcttccggctcgtactccaccggtatctgcctggcaataactccgggcaggtattcctccatatccatatagtaggagccgctggtccggtccaaaagaatccgccgtctgccggatatttccttctgctgctcatagcgcagctcctctccccggattgtgcctgtccatgcaagggtccctacataaggcaccatgagcccggtaagggccgcccatatgatgcgtttattcacaaaatccaatcccctccttcctgtatgctgacatgggaagcttacctgtgtcacggcactcccctatcattaatatatgaacagaaggacatacctatgtgccatgccttttacagcacaaaaaatatcgccgcaccgtgctcgcgccggcaggcgatatttaggttattatataatattcaggagatttttattggactcctgcatgcaggcggatgcgcaaatgcagccgttcagccggtgcgggtgcaaaacggttacaaggcctgctctcctgcttctgtgtaatgatgtacatagtacatggccccattgactgcgtttgtgaccgcattggacgtaatggttgccccgctgatggcgtctatctgcgaatccccgggattcccggaatccgtcacagtcaaagcctctccgccctttccttcaaactgttccttaaagacatcctcactggctctcatgcccagtccgggcgtatcctccagcaccaggaactccaggccgcggatggtgccgccgctctcaaacgccacggagacagccacatttcccatgtaactgtcctttgaatgggcattcaccacccagcccatcaatgcgccgtccctgtcctttgcagctgccgccgcgtccacacccacatcgccgaagtctgaggaagccagctccttattgcagtcctgtataagttcaaaatccatgacctcgaagctgtctgcctctggaaatgactttctgaatccctcctgcagctcattggcccgttcctcatccgtggtattcagctccttttccacacgctttagctcatcaatggtcaccacccaccgcaaatcattgtagccgtaaaaaccgcccagcaaatcaatggccgcctcccccttgaagttaccccccaaaaggttgtcggattcaagatagagtctggcggtccactgtccgccaggcaggttggtcctcccgctctcatccttcagattcgtgccgccggacaagatatccactgtaaaatgaatacccgtgggatgatccggctccccggtctcaaaggtatttggaccggttttgatgaaagtctccgtgtattcgtacacaggatcattttccagcttccagcggtacttggtgagatccatttcctgggttacgtcctctgtgcggcgctccacattccagctgccctcagaggggttatattcacaggtctggatcagctttccggacacagtgtagggaatcaccgccctgtccatggccagaacaaaatcatagacctcctcatagacatggccgtcctcatccttcatgcctccctccagccactccgcttcaaagctgctgtggggaatctcaaaaaatgcctcttcaggttcaaacacccgctcaggagccttcacacggctcccggaacatccggtggacaccagcacaccggcaatcagtacacatatcaaaataccttttttcataaccctcctgcgctccatgcttatttgatgatttcattttaccatagtctgtccccttccgggtaacatgttccaaaatctgttctgccaagctttccccattccccggttttccgctaattcagcggccggatgctgctgattttcatttatggatagaaaaacctccaactactgctgttaagttggaaatctaagtaaggcatcccctggctgccatgaaaattttgcatgtttaatgataaaaggcatacggctcaggaagcatccgctaacatacaggagcctaataaaaatcttgttataagttctccccaggagaaaaaagactatctattaaaacgaagcaacaccgctgagaaagccttacagaatgaggattccagcggtgtttgcttccttttcactgtcaaggatgggattccataatattttcccagacttacccgatatatgcctgaatcagcctgaacgtattctcagcaccgtccctgtggcttctctcatatccatgggatgcgtagacgcccggtccaatcagagcatggcgcacgtcatggcctgatttcagggtcgtttcaacatcagagccgtaatgtggatacacgtccacggcatagccgattccatgctccttggccagctccaccaggcggcacaggatatcgtagttatagggtccgccgctgtcctttgcacagatggatacctcacgctccgtacactgaaggccctctcccacacagcccatgtccacggaccaggcttcggttacgccctccggaacagaggcagaaccgccgtgccccacttcctcatagatggtaaagtgggcatacacccggcgctcaggtgtcacggactcatccttaagatacttggcataacccatcaaaatagctgcagacagcttatcatccaggaaacggctcttgatgtatccggatggggtaatccttgtcctgggttcaaagcacacatagtcgccgggcatgatgccaagtttcactgcatcctccctgcacgtaacgtcctcgtccaccagcacttccaccgtatcccatgtgcgctcggtcttttcatagctgccgtttacatgtacggaggcatccaccagctggcaggttccctcatagattccgtccgccttggtaataatacgcacattctcagcctcggcattggccggcttcatgcctcctatgttagtcagcttcagcctgccgttttccttaatctgggcaaccatgcctcccagggtgtcgcagtgggcctccagcaggatcccgtcttccttattcctgccgccaaaatcagcgatgacgcctcccttaaccgtgcgccgggcctgcacccccaatgcctccaattcctttaacaggtactccgtcacttccctgccgtatccggaaggactgtcaatggctaacaggttcttggcctgctccattatataatccacatacttcctacagtcagacatatccgttctcctttgttgttggtatttcttactcagagtcattctaccatacagggacggtttaatacaagggacaacctgcttctatctaaattattccatacttataagatggttctatccacacatggcatgttatgatataattttacaaaacccataatttcatatggcatcaattaatacatactggaggacctgctggtgagagcaaatgatacaaagataatttccgttacggatttacctgcatacgaagatgaatttgatatcaagcattatataaacggacttgccaactttataaaaagttgtgaaaccccattgacaattgccatccagggagaatggggcagcggcaaaactagtatcatgaacatggtacgggagcagcttgaccataccaaaaattttaaatataaatccatatggtttaacacctggcaatacgcccagtttgattccgcctcacgcttaaacataatgttcattacagatttaatagaacaggtttttgaaggagaggatgtatgcagcagtcaatctctcaataaagcggacccggtaaaagacatatataagttattaaaggtaatatcttccaattatatggacagagtgttccaagaaaaaacaggagttaataatatcacaaatataattgcaaatacactcagcaaagacaatgaatgggattaccaaaaatatttgaatacggaatctcaatccatccgaaaatttaaggatacgttcgaatcatttgttgattacagctgttatcaaaataaatatgacagaattgtctttttcattgatgatctggaccggatcgatccctgccgggcagttgaactaatggaaatcataaaaaattatctggattgtaagaaatgtatcttcgttcttgccattgattacgacgtggtaatcaggggggtaaaggctaaatttggagagacccgggaaagtaaggcccgaagcttttttgaaaaaataatacaattgcctttcatggtgcccactaattattataatgtggaaaaatatgtaacaaacatgctggggagatttggtatcactgtgaatgattctgaattaagtgataatttatttaaactaatgaaaacatgtactacaaacaacccgcgcgcaataaaaaggctccttaatgtttacgctttaaacagcatggttaattgtacgcagggcatcaacagcacacccgattttaaaaacattttacttttaggtgtattgggaattcaactttcatatccaaaactttaccaatttgttttgataaatgccaaatatctttctatgaccgttgaaggtaaacaagtctgccttttggaatatataaccaatccagagtatcaggatgagctggcgaatacagatgcagatatttacctatataaagccccaaaaaatatacctgaattatattcattaaaagaacaattagaggaagccggtatatccgatgagtgggatgaattatggggagtactggaaacctatacaaaacttctgaaagacagcaaaaattctattcccacaggcacattagagatatttataaatatattgaatttatcagagctttcttcttatggctcacaaaaaaaggacgtttccaagagaagcattcccttggactatgaaatatacggcgaaaagagacatgctgattccgctattgaaatgtatctgtatgtcatggaaaaaattctgacgaaaaatgccgcccctttagatagacagcaaatacgggacttatatactactgtagactgcttttacgattgcagcaaattaatcgccaatggtaactttgacggtaatactgaggaaatggttcagttcatcaaaaaaaaggcaaaagacggcagtcttcctcccagtttggaaggacaaaccgtctcaaaattccgccagggaaaatttgtagaaattggaaatataaatgcctttataggtgcttcactgagcctgccgcttatgcgcaattatattaaatcacttttggaatactttggcgatagcgatctttttgagtgtcgctactcataggactctaatacaaataaatagcgctgatttatttaatactaattttaaatagaccagcgctttcttatatattgattattcccggtttatattctttatatttagcccttgctctccagcccgtataacctggagtacttctccttcaaatacctgacataatattccggattaaaatcctccccggtcacatccttcagtatctgacggctgtcttttaacttaccatactgatgaatgtgttccctgaggtaatcccgtatcacatccaccctgccatccttaagcaggctgtcaaaatccatgatttccttcatatgataatataactgggctccaaaagcgctgcccagggcataggacgggaaatatccaaaggatccctgggaccagtggatgtcctggagcactccctccgccgggttctctggacgcacgcccagatactcctcatatttgtcagcccagagctggggcagcttctccacgtccaaatcttcctctatcagcatcttctcaatctcatatcgaatcagcacatggagactgtagctcagttcatcggcctctgtgcggattaggcccggagtcactttgttgaccgcctccacgaactggtccaggttcaccttgcccaactgttccggaaacatggcctgcaccctgtcatatatgggaacccagaaggaacggctgcgcccgataatattctcaaaaaaccgtgactgggactcatgcatccccatgctggccccctggcccacaggcgtgagcgtcaggtcatcccctatgcccagctcatagatggcatgcccggcctcatggatcacagaaaacagggaactgtccacacagtccgtgtaatgggtggtgatgcgcacatccttgttgtgaaggttggtggtaaaaggatgggcgctgaccgccataacgccccggtcaaagtcaaatcccacatattccgccaggaaccgccccagctcctcctgcttttcctccgggtaatcgccctttaggaaggaatcctcaatcatctttccctcttccatcacctttttgagaaacggcaccagctgttttttcagcacactgaaaaaccggtccaggttctccatggaaaaacccttttcatagtcatctagcatcacatcgtacagcttctttccatcctttgccctgtaacccgcaaactttttctggaatccgatgaccttttcaagggttggggcaaacgcttcaaaatcctggtcctttttggccctggcccaaacgctggtagccctggctgtgagacgggcgaattcctggtattcatcctggggaatggggcagatctgttccctctcttccagcagctcccttacattggcagcctctgccgtggtcaggcttttatcaccccggcatttctccagcagttttttcatctcatcgcaggtcactgcctgaaaatattcccctgacagaaccccgatcaccttggaggtaagctctcccgcttccctgggggccagtgtctcattatcccactcaaacagtgtcatggctgtcttgatggccatggccttatccatatatgtctgtaactcaccgtacgctttgctcattgtttcgctcctctcgcattttgtattctccggatgattcatttgactcgttcgcccagtacaggtgtaaagcactctaaacaagtttctcctgtatttttattattactcacagcagaaaaaaattaccgttgacctgtcatgaatctatttaattatagtgcggttccggttggtattcaatgggaaaagtcatgcgggactgctacaaagcgattccattccacaataatatctggttgacggacaggaataccacccataaaaccgctacccatccaattactgtggtcaccttactatttttatgtttccccaatacactctctttactgctcaaaagcatcaacatcacggttaccagaggcgctccgataatggtagctccctgagccatgattgtcagctgaatgggattggagccaaatatcagtcccacgcaggctcccagggcaatgatgatgcttgagaacatctttacccagaaatcattgatggtttttcctaatttcagtgagtctgcaaggaacgttcccccaataaccgcatttgctatcacagaagagaatacggccgcaaaaaatccaagcagaaagagcccgtttgcaaattctcccagtaaaggtttcagcagtgccgcgatggatagaacactggtaatctccgctccttttggcaggatggtggctgcggttatcagtatgatagctgtaatacatgacaaaatgataattccggccgtggaatcccgtcctgccttatcataattatccatggtccaccccttcccctgaaccagataactttggcaggcagctcccgctatactgaaggtagttgcagacattgacacgataatctgccatccgcttaccttgcccgggataaatcccaaggccaattcaccgtaatgaatccggccaaaaaagaatacaatattaccggcaaagcaaacaagcatgatgagtaccatcactgtcattattttttccaggagctgataaaaactgctggatctccaaatcaataccatgattatcaaaaagctgacaataatccacacttttattcccataaacggaaacaatgcgtttaacgcaacccctgtgttaatgttattcccggcttgaaatcctgtacaaatcaaggaacagcacagtccaaacaaaactgccatgcctcttgaataattgtcctcaatatgtcccagcatactcttctcgcccacacagccgattttagccgctatctttgtaaaagttatcataaatacagccgccagcgccaatacccacagatatgaatatccagccgatgcccctgctttggatgctgttatgatgcttcccgcgccaaataccgttgctgctatgatgagccctggacccagggatgatatcagctgcctcagccagcccccttctcggtccgttttcttatctctgttccccataccatattctcccttctgcctgcttatatatcaaggccccatctatccaaattgcctgcaacaaatatatcatcattccattgggggtacatcctgtatatccggttgatttcctctatctgttcctgagatatggtctcctttggatccagacacaatgtgtttttaaagatcccttgtctcctaagtatctcatggagtccggggatacatcctccaaactcatgagccgcatcaaaaaatgctccgttaatatccgttagctccgctgcctgcgttaataaatctgcggggatgcagtcctgtccctgtatatgcttaaccttttcaaacagctcaactgcttttttcgtccatacgcaccagtgtcccagcaatcctcccctaaaaccaatgttccgttcaactccatccacggtaaagcggtagggcgttaagaggtccacaagcagattatcgtcattaccggtgtaaagcgcgattttctcttcccgtcctgagaaagcaacggcgcgcatcacatcaaccgtagaataccggttaaaggaagcacactttatggctactacattgggaatcctgcaaatgttttcccaatacctgtatgtaaaccgcctgccccccactgctgtttgaagataaaaaccaatgacgggcatgatttcagccacagcctttgtgcgttccagaagttcctcctctgtcaaatgtcctaagccgccagggcttaagagtactgcatcgtaacccatcctttttgccagaacagcctcgctcacagcctggtctgtctcaccgcataccccgcttatttttacaatggtctttttatgcttctcttcaaaacgtcctatttcctctgagacaagctggagtatacgctccaggaaccggtgctccggatttctgattgcaaactgggtgctgtgcactgctgttgcgatgccgcccactcctgcgtccagataataccgaatcagaatcttctgggttttttcatccatgctgcggtcctccttcaaggccagaggcgtggctggtatgaatgttccttttgaaagaatctttaatgcttcttcatgtctgttcaatttaatagctcccccctctctcctcaaaatgcgtgggcagtccaaggtttctgcctccatccgccacccattctgcctgccagcgtatcaacgtgtctgccggaacagcaggatatccgaattgttccattgcctgcgatgcgttgttcagataagcgtcattgccttcttccccctcaaatattggttccctgcccaaaaatccacctattttctcagccgcttttcttacagaaatcacctctggacccgtgacattcattatctttgggggattggatgcatgaagaaggcctctcaccccaatctcagcagcactaccctgccagatgcagttaaagcaaggggtagttacagaaatgggagtttggttcataatcttatcagcaatatcagccaataccccatatcttaaatccaccgcaaaatttaatctgtacataaataccttggtaccgtaacggctggagtaatattcaaaagtacgctctcttgcaagacagctctgggcatattcccccaccggagccaccttatccttttccgtacatccgccggatgccaatggcaccataggataaatattgccggatgaaaataccacaatccttgattttttatatttctcccctacaaatgcaggcaatacggaattaactccccaggtcatccattcctgtccgtccgtaccgaattttctccctgccatgtaaataacattcgggacttccggaagattttctaattgtttcaaatcctgtaaatccgcctggatcatttccacatgattttcttccagatattttcttacctcaggatcatggaaacgtgatacggcgatcaccttcttatgaatgcctgccctctccatggccttgctggccaaaacacagattgtatgtcccattttcccgccagctcccaaaaccaaaatatcgccatcaatccgtttcatatcctccaccattgccagtgttggttctgtcaatacatcattcagctttttctctgtccacatatgcttgctcctttccatccggatattcctatacccgcttctgtcacaatgacagcatttttttgcctgtattttgcttatatttaatacaggtgctatgccataccccttcaaaccttagtttacattttttcgccccctccttttatatataactagttagttagtttttataaaaaaacataagccgaaaccggctcagtctttttttatataagaaacaaccatcttggttacctgcttgattcgtctttcaatctcatcattcttatccaaatctttttttaaaatctgttttaaggtccagcggttggaaaaatagttaaagctgcatgcaatcaatgtctggaatatatcttcttcacatacctgttccgaaatttcccctgcttttttcccttcctccattatctttcccaattccaatcggatggggttttttacatcccccagctccttttcctggaaataatatccgtaattcagattttcccacatgaccatcctgacataggaaggattatcgcgaaggaaataaaaataagtcctcaccagatccgttatctcagatatacagttcttctgattacatatgaccaaatcttcactgtctcccaacctgtcgtaaacatttttaagaactgttttatacagttcctctttatttccaaaatactggtaaatcatacctttattaatctttgccttggcagcaatctcgtctacccgcgctccatatattcccttttcggaaaattcctcttctgctgcctttaatatggcctgctttgtctgggtggattttatctcttgtttcgtcatgacttcctctttctcaaaaactaactggttggttacattatataaaagaatggcagcaatgtcaatacattgattcaaacatattacgcaacttcccccgcttcccatcccccacataaaaatgagccgcccacaatcccgcggcagctcatcctttcttttctttctaacaattccctcactgcgcctgagcagcctcagttccgccttccaccggaaccaggcccgcagccacatatttcttcttataaacaacagtagccacaccattgatgactccgaccaccataatcgcgatgatgtaaataaaaatccttgtatatccggcgttgccgcaggtgtccagccaatggccgtacatggctgcctgaaacagatccgggcagaatccgatggcgcagacaacgccggcagtggacgccgcatagcgcctgggtattttcacctcagacggcaccgcaaacatggcgcctcttgcaatatgtaccataaaaccaatcaccaatgtcataacagtcagaaggactgacggcacccctgcgggcatgaacatgaaaatcagggtgatgacggcgccgcaggccagaacagtggctatgaccgatgacacggaatgaatacggtcccccatatatccgcccagaggcgctcccacaatacggattccatacgtcctgatgatggcgatggccccggatcccaccacggttgcccccagcacatttgtgaaatacggggtaaagtatgacagtgtctggtatgtggaatatgtggcaaataccgctatgcccgcaaaccatgtgcggggatccttaaacactcccgcccattccttcatggacagcttggtctcctgaccgctgtcccctccgtcctggcctttccctgccttttcagggtcagacagcaggaacaccagggcaatggttgcaataagcccgactgccccgtagcttatgataaccgcctttaatcctgccacgcctcccatggctcccactgccaccttggcatagaggcccagggcaataaaattgataataacgcttgccaggccgcaggctgactccgtaaatccgaatatggtgccctggctttcctcatcccccaccagacgcaccagctttgtatgtgccggaaaatagaggattaatcccgcaacagccaggcccgcccagataaagatggcaaaggtgtagctcatattcatggccaggagaaaatttagggcgcaggtgatgaacattcccagaagatagaccttttttgtgttaaatttatcgcttaacgcgcctccaaagggcgccagcagatttccgattccgaaaatggcaatcaggaagcccagctgcgtattggtggcgtgaagggcgcctgcaagatcatcataaaatacatactgtacaaaaggtgtggcatacacaaccgcaaatgccagacccataaaaaatacgattaaaagctgtttaccggtgattgagacctttgaattagacataataacccctcctgtttatttacctgattgggctgccaggcaggccaatgcaatggaattcagtttgatttctgctgtgtcggaacgcgaccccaggataacggggttggaagctcccagcacaataccgccccatgggctgcggcagagatgtatccatgacttgcccatgatattgcccgcctctatgttggggaatatgaccagatccacatcccctgtaatcctgctgtcgattttcttgtgggccgctgcctttgggtcaaatgcaacgtcaaatgcaatgggaccttctatgatgcatggaagaaatccctcttcgtttttaaccgcctctaccagaccggccgcatccgtggtggaaaccaccttggggtccaccatctcgttggccgtgagcaccgccaccttgggattctgtattcccatatttcggaccgcgtacagaaggttcttaagtatatccttcttctgctccaggttcggggccacattgatgccgctgtcggaacagaacagcagcttgtgatagcccggcgcctcgtagacagccatcatggacagcagccgtccggtgcgaagcccccattccctgttgaggattcccctcatatagacgctggtattgacaagccccttcatcagtacctgggcgctgccgtcgtgtacggccctgaccgcccgctccactgcctcctcctccgtgccggcctgaaggatttccagaggcttaagccctatgcggccgcagagttcctctatcctctcccggtctcctgtcagcacgggttttataaatccctggtccgctgctgcttttaccgacaaaagcacttcctggtcagcagcctgggccacgcttaccaccaaaggctctgatgacctgacccgctcctgtaattctgcaaaattcttaatcatggtttatttctcctcaatatatattatcttaattggccggccctaatcatcagcttaatttatggctgtgaatcaatctatggcacaggctctttttctcttccgcgccaaccttcagcacatagatgccgaacatggccaggacaatggataaaacagggtttacataattcaatactgcatatttccagtactgggacacgcccaccccaagggtggagaggataaatacgccgctggtggaccagggaataaatacctgggtcaatgtgccgccttcttccagcagccgcgagagcatttccgggcgcagtcccctttccctgaatgcttccttatataaactgccgtttaccacgatggagaggaatacctcccccatggtaagggtgccgaaggtcgtgctggctatgaccaccggcaccatcatcctgtcgctcctgacccgtttaataataaccttcacgatttggggaagataccccacatgctccataacacccccgaatgatatggcgatacaggacagggaaaatgtatacatcatactctgtattccgcccctcagcagcagcttatccaccagctccacaccggtggattccgcatagccgtaattgagtccggctaccacctccctcatgggacagccctgatagaacactgccaccaatacagccaggaccgtgccgatggccatactgggaactgcgggatatttcatcaggttcagaatcagaagcaccgccataggcatcagcaccagggggcttatgtgaaaccggccgccgatggtatccagaaacaggtttacagtatccatgctgaaattccctccgtgataggataatcccaatactgtaaatactgccagagtaatgatataggaaggaaaggtagtcttccacatagccccaatatgggcatacagcgtggttcccgctgctgcgggggccaggttggtgctgtctgatatggatgacatcttatctccgaaaaatgcccctgatataaccatgcctgcggtgagaggcgcaggtatccccatacctgccccaattcccatcatagccagtcccatggtgcccacggttccccaggacgtgccgatggatatggacgtaagactgcacaaaagcaggcctatgggaaggaaataatcagggataatatattgcagtccgtagtaaataagggccggcacggttcctgaaaatatcagcgaactgattatgataccgataaatataaatatgatcatggctgccagggcctggcccagggatttcttcatacagtccaccaggtccatgaagctgtagcccaaaggcaccgaagcaatgcacaccacggccagggcgcaaagcagcacaatatgtatgtcataatcaagcagcacaacccccagcaataaaaccgcaatggctgccccaaacaccaggaaggacatgacggcccccggctgtctcttttctttgtggtcctcgctcaatgaatccaccctcttcctctcatatggccaaatcactcatattccccgggttcttcttcccccttaagcaccctcagcgccccaagggccagggctgtcatctcgaattcccctgccaccacttccaccggcgcaaggaatcccgccatacgcctgatttcatctgtcacataccgggaatgggctatgcctcctgtcagtacgatgcagtccacctttccttcaaagacagccgcatacgaacatatctcctttgccaccatgtacacaaacgcttcatagaccagctttgccgtctcgtccccaagtcccatccggcgttccacctcaccggcatcttttgtgcccaggtagtcatacatgccgccggtgctgctgattttggccaccatctcttcacgggtgtattttccggaatagcacagctccaccagtgggtaggtaggaagtccgccgctccgctccggagaaaagggaccgttggtcctgcctccgcttccatctatcatctggccgtttttgtgggccaccacggagtttccggaacccagatgggctatgatcagactgctctcctcatacttctttccgatacgctccgctgcccatctggccacagctttatggttcagcgcatgaaaccagctgggacgctccaggtcggaaatgcctgatatcctggccttcggcatcagctcatccaccgaaacagggtccaccacaaaagacggcaccccaatctggtctccgatgcttctggccagggccgctcccaggttagaaggatgctctccgtggaccgcatgttccaaatcctccagcatcctctcattcacccggtaggtgccgcccggtatgggattcataagccctccccgcccagccactccggacagctcatgtatatccacgccttcttcctcaagcgttttaaggatcagccccttcctgtaaccgaactggtcaaatacatggctgaacccgcttaactcctcctgggtgtgaataatgttctttttgagcacctgttcctcatcctcaaatacagcgatttttgtggatgtccctccaggattgatgattaatagtttcattgaaaattacccctctttccgtctggtggtttaaacgttgttctattgtacggaacaccgttctgtaaaagaggtaaaaaagaaaggaaactcaatccgttcctttccccttcctgtatcaaatcacatacagcaatggttatagacagcataatagcatagctttcatgtgttgtcaaatattttttgtgcaatttatcttttcccctctgccgcgcctggcaggcagacgtaaatatccctaaaaattcccagatatatccctggcggtattgcagacagcctcaatcctgtcctctaaatccgaggagttcatacggctggtggggccggaaagactgatggccgcaacagcctttttattgcggtcaaggataggggctcctatgcaggtaaggcccatctcctgctcctcatggtccatggcgtaacccctgcgccgcaccttgtcgatttcctccttcaaatcctcataggaaagaatggtgtttaccgtatatcgggtcagctcccgttcctcatagggtgcccagtctatattatcaccaaaggccagaaggcattttccaaccgcagagcaatggcactcactgagggagcctaccggcgggttcacggtcaaaagctgctggtcgctcatctccttcagtataatgacactgtggtatacatcgccgggattatgctctaatatggacacgttcaccacttcatggtatttctggtgcagcctgcgggcataaggccgtataacctcctggattcccattttattctccacgctctttcccagcacaaacagctggcttcccagccagtacttctctgtctccgggttcctgctcacaaatcctctggcttccagagtggataaggtgcggaacaccgtactcttgtaaacccccatatcagaagcaatctgggttatacccacttccctgccctgcttatttaaataaattaacagttccaatgcccggtccaatgcctggatcgtatcagccatcctttgtttcctcctatattccagttacattccgtatcctgtatgtatccaaaccatctgataataattaaaaaccatttttttaacgatgtcaaggataaacggtgtttgtgcactattcatatatttgggcttttatttttgtctaaatagcaaatagtctcctacttgacaattaaaatgcaacagatgtataattccatttaacggaacaacgttctatacagcagaacacaaaatattgacaggaggattaattatgaaggtcacggtaaataaagaccgctgcaaggaatgtggattatgcatccaccactgtccgagaaaggctatcagcaaatgtgatgtcctgaatgccaacggttactatccggtccaggtggacgacgaggcgtgtattgcctgcggaatgtgctacatcacatgtccggacggcgtattccacgtatcaggaaatacagaaggggaggttaaatgattcatggcagagatgatgaaaggcaatgaagccattgcagaggcagccgtcagggctggagttaaattctatgcaggttatcccattacaccgtccagcgagattatggaatatttatcctggcgtctcccggaagtgggcggcagtttcgtgcaggcggaaagcgagctggcaggcatcaacatggtaatcggcgcagccgcgtccggagtcagggccctgaccgcttcctccggcccaggcatatccctgaaacaggaaggcgtatccaccctgtccgacgagggcctgtccgcggtggtcataacccaggtaagatacggcaacgggctgggcaccctgctgtccgcccagtgtgattacaaccgtgagacaagaggcggcggccacggcgattaccgctgtctggtatttgcccctgcttcggtccaggaattcgtggacctgatgcgcccggcttatgaactggctgaaaaataccgcgtggtatccgtcatgatgggcgaagccaccctgggccagatgatggagccggtaacccttcccgatttcgtggaggcagagcgcaccccatgggcgttaaacggccattatacatacaaaaaaatcggtatctttgagcgggactccatgaaggaagccgtggagctggtagacaaatataacactatcagggaaaatgagcagcggtgggaagatgagggactggaggatgcggactatgtattcgtgtcatacggggttccgggccgcagcacccttggcgctgtccgcgagctgagggcccagggagaaaaagtgggaatcatccgccccatcacggtctggcctttcccggaaaaagcattttacaaaatcaatcccaacgtaaagggaatcatcaccgtggaggccaatgctacgggccagctggtggatgacgctgccctctacacgaaaaaggcgttaaaggagcgcaatgtgccggcctacgcccttacctatgtgtttggcacgccaaccatccgcaatatcaaaaaagactattttgaagtaaaatcaggcagcaaaaaggaggtatattaaaatgtcagcttccaataaagaaagaaaagtccctgttctggtggataagccaatggacttctgcccgggatgcggccacggaatcataagccgcctcatcatggagtgtctggatgaactggagcagagtgataacatcatcttccccattggagtgggatgttcctccaatctgggtgcaggcctggaatgcgaccgcctccactgttcccatggacgggcaggcgcagtggccaccggcatgaagcgggtcaatccggatgtcctcatcgtatcctaccagggcgacggcgacgcctacaacataggaatcgcggaaaccttcaacgcggcataccgcaatgaaaacataactgttatcgttgtgaacaacaccaacttcggcatgaccggcggtcagatgagccttaccaccatggaaggccagaagacctccaccagcgtgcatggacgtgactgcagcgtcaccggttatcccctgcgttttcctgagatggtggccagggaattccccggcgctgcctacgcggccaggggcacagtgaccagtccttccaaaatcaaccagctgaagggttatatcaaaaacggcctccaggcgcagatgaatcatgagggatactctgtcatcgaagtgctctccccctgtccggtaaactggggacttaccccggtaaaggccatggagcgtattgaaagcgaactggtcccctactatccattaggtgaattcaagaaaagagaggtgcgttaatcatgaaggaaatcgtatttgcaggttccggcggacagggtgtattgacagccgggctaatcatctctgatattgccgccacagagggcatcaatgtgacctgggtcccctcctacggctccgccatgcgcggcggcactgccaactgcacggtgaaatactgtgagaataccatttataacccatcccaggaacagcctgacctgcttctggccatgaacagcccatcctttcacaaattcctccccctggtagcgcccggcggggtggtggtaatcggcgacctggtggagataccggaggatgcccggaaggacgtgacctatgtgcgtgtgccggccaccaggatttccactgaattaaacaatcccaagggcgccaatattgtcatgacaggcgccatcgtaaagctcatgggcgactttaccaaggaggcagccatcgcagccatgatccatatgtttgagaaaaagggaaaatcccgttttaatgaagccaatgaaaaggcattcaacgccgggtatgacgcggtggaaacactggctttggattcctgcgtaagataaatgattttgaggcatccgggaggaataccaacggtttccctcccgaatgcccctctattcatacaaatagtgatatgtaatacggcctttgcaatccctgttccatcagaccgccatttctgatggggcagggttttgcaattggcaaaccctctgcccgcttattggcaggtctgcatgatgccgtatcaccattacataaggtatctgtcacgcaggatatccattacacaagataccccttcatcaattcatccaccgcttcctgatctcctctggccgcatttatttccaaggaccagtccagtcccctgtacttctcacaggaggaatcatgttcaataaaatcgatcattttgtctaccatttcctcaggccagaccgtgctgtcaatttcagccgcactgtatgttccctgttccagcatggcaaaaccaaatatatccttggcatgtgatttttcagcgctgttgaccagctcctccacaagatatgcggggataaacaggataccgctggtggtgcccatgacaatatcgccgggcatacacactgccttgccaatctttgcaggtccgttataggatgtcatcaggcattccctgatgggggtggggtctgttcccctgtaataaacctgggtgtcaatcttctgcatctgctcgatatcgcgcacacctccccatattacagcgccccctgtcctggtcctgacattgatggctgtggtcagattcccgcctacaaatgtgccgttccaaaccttgtcaaacatgtcggcaaccaccacatccccttcctgcaggtggtcaaccacccactggttacatgtaccctgataccctctggcatccccttccgtcctgacagcttccattaaatcaggtcttgtgggcataaagacagccgttacagcccttcctaccagtttcagtccgtcgtgcagcttcttcatctcaccctcaaactgaaacttgtagtccttaagaaataaaggcagccatatctcctcaattgtcatggtccgcaatttatccagaagatagtccggtaccctgggccttccgtcttcaaagcgctctcccttccaccggctggtcaactctataatctgatctcttgtataataaatcatattttcccctctcccattatgaccaggtgcggtcatgtgaataatcattgtcccaatcggatgtatctgcccacatatccgggtaatccggatggagatgttcacgtatcacttcatcctccaggttttcaatcccaagccccggcgcgtcaggcactgttatatatccgttgtctacgattggatttggcaatcctgttaccaggtcggaccaccatggaacgtccacggaatggaactccaaagccaggaagttttcagtggctgcaatactgtggaccgctgccatacaggcaatggggctttccgccatatgtactgccatggccactccgtattcctgtgccatgtccccgattttcttgttctccagtatgccaccgctggtcagaatatccggatggatgactgatacgcctccccgttccataagaggacggaaattctctttcagatatatgtcctcacctgtacaaatgggcactgtggtggaatttctcagccttacgtactggtctgtcagctgccagggtatcaggtcctccatccatgcgatattgtacttctcaatccttctggccagtctgatgcaggattccacgcctatatgcccgaaatggtcaatagccagaggaatctcatacccaatcacacttctaacatcctttacatactgctccagaatatcataaccatattccgttacctggacccctgtaaacggatggggaatattctgcatgtcatacatccggttccttaagctcctcttttccggagtcagcctgcggctgatggcctcatatgtcctggacgactggtttaaatccccgaccatgcctaacggcgcgcacaacgcccccggaatgtcatacagaagatcgattcccaaatccattttcaggaaagtaaatcccttctccatcctctttttaagggcttcccccatttccttgccggtatgttttccctcgatatccgtatcgcagtacattctgatgcggtccctgaatttacctcccagcatctgatacaccggtaccccatatgcttttcccgccaggtcccagagggcaagctctatgccgcatactccgccgccctgtctggcagggcctccgaactgtttaatcctgcggaacagcttatcaatattgcagggattctcgcctataagacggcttttaagtgccagcacataattgcgggacccgccgtccctgacttctccatagcccaccagtccctggtttgtataaacctttaccagggtacaatgcatgggagcccctacaatatcagctacccttatgtccgtaatctttaagtcacctggtctggaattggtattcacatgatccataagcatatcgtctctatcttccattcctgtttcctctcttttattctcgcgttttacttaacacttccttcatatttgccggatatgagcatgctctgcgcaacaatataaagcagcgttaccggcagtgagcagaccactgaagcgctcatgattctcccccatatggcggaatcagcatacttgaagcccgatatggctaccgtagccgttttctgcacattgctggttgtcataatcatggcatacagatattcattccacgccatggtaaatgcaaaggtggccaccactgcaattccgggaagggcaatcggcataatgatataccacagcgtctgcagacggttgcagccgtctataagcgccgcctcctccagcgcatatggaatcgccttaaaatagctgataagcatatagcagcaatagggcactacaaatgtagggtatatgattaaaagcgcatatttattatcatagaaccccaagctgctcacaaacacatacatgggtacgaacagcaccgccgtaggcataaggtatgaaattataatactgttcctgaaaaaagatcttcccggatacttaagccgtgtcattgcatacgatccaagtataccgattgccaggcatatgattgttgtaatggccgctatcacaaagctgttccagacattgtgcataaaagaggtgttataaatcaaatcaatataatgatcaaaggttattacatttgaaaataacggcggtctggctacatacatttcttcatttacagtaagggatgattttatcatccagtaaatgggaaagattgtccataaaagcgcaatcattaaaatcccgtaggtagctgtggtccgcatgatccggctgcgtttcttcattaccatccagtccatctccttccctattcatttctgtccccattaattaccttctgggataccagaatcagtatgagcattagcggtatcaccgacactgccaccgagagagccctgccaaatgaattctgtataaatgccaggtcataggtgtaagtggagattacactggaggagtaaatcggtccacctccagtgattaaaaatacattctcaaaatcattaaaggtccatatggttgacaaaagtgtggaaatgcccaaaacgcttgagattcccggaagcgttatataccagaaacgcttaaacatacctgcgccgtccacataggccgcctcaaaaatctgtccgtccagagtctgcagcgctcccagaagactgaacatgaagaaaggcacacctctccacacattcacaatcatggtgcttaacagcgtgatatcagggttactcagccatgggataggaaggcttataagtccggctttcagcagcaggctgttgataatgccgtacgtgctgtcatacatccatctccaggtagtggccgccaccattccgggcaatgcccagggaataagaagcgcagtcctgaaaaatgcctttcccctgaacttctggttcaggataactgccagcagaagtcccagcgccagtttcgccgtgatacatcccactgtatagataatcgtattgtacagggacttccagtaaatcttatccccaaatagagccagatagttgtcaaacccaataaactgttccggtacccctaccactttgttcgtaaagcttaagtacaatgcccttataaacgggattccggtaataccaaatatcacggcagcaattggcaccatcaacagaagcccgagacgcttatctaacagctgctgggaatgcgaatacttccttttctctgatttttttcctgccatcttatccccctgtcatgccaattccattgttagttataaatcttattgaattctgcctccagatggtccagggcttcctgcggatcagccttgttaacaactatttcctgtacggccttaacgcaaagctggtttgtaaaggataccgtagccctttcatctgacggcgccggataataggtcttatatgtattcttagagttggcaagccatcctgcattgaccgggtccttccagaaatccgtgtcatccactccgttcaccaccggctgccacatggcacccatggcttcgatcatggcgttataattatccaggtcctcaaaatagtatttaacaaactcttttgcggtctctgtatttttacctgtctcaaatattccgaatacattggcgccgcccagggtgaatgcctctccggttggccctgcgggatatgcgatgatctgtgtattcgcaagaagatctggtttttcctctttcatgctggataccacggaacctgaatttgtgatgacacccacagtaccggccaggtatgcgttgttattccagctgtcgtctcccgtaatcgcatcaggcggaatcagtccctcttcatataagcttgcaataaatttaagtgcttccagtgtttcgggagaattaaccgttacctttccgttctcgtctaccggaattcctccccagtccagtataatggttctgcaaaatccctcggcatctcctccgccggatgcgcccatggcaaatccaaggccgtaaaagccgttagccgggtcattcatcagcttggcgccttccttcagttcttcccaggttgtgggaatatccatcccggttttctcccactggtccgtccttaagtacatgccgggcgccgtaaatgccagtggcacaagatagggcttaccgttgaaggttcccagtatttttgagttctccgtaaaatccacggcctcaaatatatctgagcactctgctatctgctgcatggaaacaaactgccccaccagcgtatcatcacccacaatcaggtcaggggcattgcctgcttcaatggcagccatcaacttctgcttcatatcagcagcaggtatgaccacataatccacatccacatgattctcgctggcaaattcgtctacctttgccttcatcatagtgttatagccctcaacatactctgacttatcccagaataccatcttcttctgttccgcggcgcttcctcctgattccgctgatgctgttgtctcagccttggcggcggtgggagctgctgttgtaaccacgttttccgatgatttcacagaacatcccgcaaccatagatgctgctaatccaaatcccagtacaagagatactatttttgtatatcttttcttcataacttcctgcctcctcgctttttaggttttgaagttgagtttttcacacacaccttcaaaccaaccagttccgactcaaaaggctttccgctgtcaatcagctttacaagcttcttcatagcgattctcgtcaccttctcagccttggattccacacaggtaaaatcctgatactcctcatctacattggaattcttataatactcaagaatcatcacagacaggtcttccggtatcctgattccatatccctttaccacatccataaattggttcataaagcagctgataataccaactgctgttggacggtttgcaggattaagcagttcattgaacagcagcttgatatcggatgatgattcattctgattgattctgatataagaatagtccaatttctcttctttcctttcagacataaactcattaaaagccgtacttctcacagtctgcaccacgctgttggactttccctccgtgacaatggccacttttttgtgctccaggttataaaaatactccagtacatccttcatcgctttgccgtggtcagacgccacataattataattctccaggctgagtatcttacccacgcacacataagggattcctgccctctcaaactccctgaaggccagactgtcttcttccaggtcatacaataggatgccgtctaccagagacgacgacaggctctttaaatactctgtgtctttattgatatcatctgaatccatggaataaatcagagtattataatcaaatttctttgcttcctcgccaagagccgagaatatgaccgggtaatacatggtatcgtttaaatgtgaaatatttctgggaatggctaaacaaactgtcttgctgtgatttttagacgacagcctgcgggcgctcaaacttggtgtataccccaattcatcaattgcattttttatcttctttttcgtctcgtcagacattctctcgaaatttccattcagataatttgatacagtggacttggaaacccctgaaagctttgctacatcagatattgtcgcgttcttcatactctcacctcatgaattatgataataaaccaatattaccacacttcctgctcaaaaaacatggtcttttcgcaaaatacgcgtaggtggaacggtttagtagaacggtttatcaaatgtataaaaaaaataaaaactgctttggtggagcggtttatctcttcccttatttaataatatagcattgaacattatgcttgtcaatgtgtaatttatttttatttttttatgcatattttatattctttcacacaaaaacattttatcccctcaatacatgcatgttttttttgtttgtttgattatttttttgtatttattgacagcttcaacctgtttttaatgtaacacacattaaattacaattcttttttctgactgttccttatacatggcatggatccgcgacgctgcatttaaaagcctatatggccgtaatggaggcttccggtaagtcatcgtcctgagatggcaacagtctgtacgtcctgctccacagcctgtaaaaaaacaccagccggccggatctgcttccggcctggctggctatcttcttctatcttactttatgaacagctgtgtccaataatcggttccgctggcatcctgataatgccctaccccaatagaagtaaaatcacgattcaggatattggccctgtggcctgagctgttcatccagctctgcatcactgcctcaggcgagttctgtccgtaagcaatattctcacccacactccggtagctgattcccgcctgtgtcaggactgtactgaaattgctgccatcaggcctggtgtgtgaaaatgtgcccttgatttcctgcgctctcttgttggctgcctctgccacgccttcgtgaacagacagcggactaagacccgccttggccctctctgcatttaccagttcaaccactgcgtccgcaaatgcgtcctggctgccgccgttatccgggtcgccgggaaccgtatcccccggagcctcgggagccgtacctgggttatccggctcacccggcagtgaattgtccggcagtgagctgtccgggctgtcaggcagtgagttgtccggcagtgagctgtccggcagctcaggtcccggcagttccggtgtggggaagatgaagtcgggcggtgtaacctgcggcagactgttgtccggcagcacaggtcctgctccccatccgttattctggttcccgttgttattctggccccagccgccattctggccccagttcccattctggcctatattaccaggaagacagttctgtcctcccactccaatcacgtatgcgcttccattagcaaaaggaatctgatatgtagatacggctgccagtgatgtcaccggtatggctgcggatacaagcatggctgcggctgcggacaatgtgtacatggatatctttctcatggttacctccttatgtgttacataattattacatttctgttacaaaactataatagcacataatatttggaaaaccattaggaaaagaatggaaataatgtatgccgcagcccctctccggcgccagctctctgctatccctttatgccagtggatgcaataccttccacgtaatatttctgaagaaatacgaacatcagcagcatggggattgccgatatggtcagggatgccatgatagcgccatagtgtattggctttgatccaaaaaacgtctggatggccagctggattgtcctcatatcctcccctgtaaccaccagcatgggccacatgaaatcattccagtgggccacgaagtccaggatgaagatggtggcgtacaccgtgcctgagatgggcattacaatggtaaaaaatgtcttgatggggccgcagccgtctatggctgccgcttccagcagatcatcgggaatgtctaagaagaactggcggaacatgtagatggagaagcatttccccacaaagggaacaatcagcccggcccaggtattcacccacccaaggctggcaacctccttgtaaaggggcagcatgatggcctccatgggaagcaccataaggctgatgaccactgtcagcagcagctcctttccggggaaattgaattttgccagggcatatccgcagacggaattgaccgccaggtccaggattacaattacaaacacatagaacaggctgttgaggatgaatttcatcatatttaccctggtaaacacctcaacatagttcccaagagtggccgctgtgggccagaacgtcctgatattgctcatgtcggagaatatctgcgcctccggtttcagggacgcggcaatcatccacagaagcggcgatacaaaaatcagggcgacaattgcatttccgccatagaacaaaacgcgtttcaggatatctttttcctttaatcccatgattctccctcctccttaatctgccttgatgacccgcttcagcatcagcgacatggtgaccactatgacaaagaatacggttgccacgctgcaggcgtacccgaaatttctgctctggaagccctgttcatagatataatacacaagggtcctggtggagttctgggggccgccctgggtcatgacatagggctgcgtgaacagcttcatggcctggatcattgtaatcatcacaacgtatttaatcacattcttaagtcccggcagggtcacatacagaaacttctgaaaggctcccgcaccgtcaatggacgccgcttcatactggtctcccggtatggcctgaagtcctgccaggaaaatcatcatctgataccctgccgcctgccaggccgacataaagataatggaattcatggacgtcttggggtctgtcaggaaaccgcagggggcaaaacccagctttgtgagaaacgcgttcagaaggcctgtgctggggttgggattgtacagcacgctccagaggatggcaaccaccaccatggatgtgatgttggggctgaaataggctgcccggaatatggatactccctttcttctggatgaaatcagcatggctaaaagcagggccagaatgcactggaagggaactaccaccaccgtaaagtaaatggtattaaccagggatttcttaaagtccctgtccccaaacagctccacgaaattatccagtccgcagaatttaatcttatccggcctgaggatattgtaatcagtaaatgcatagcggaccgtggaaacagcaggcagtatgaggaacgctgccagcagcaccactgccggaaggatgaacaggaacgccgcccgtctttcatggaccttattctttgtaccatacttcatgatatacctcctttccctgttaaagggaagggggaccattgtccccctcaccattactccgcgtagttcttctggtagttggaatcaaaatcagctgccagctggtctaaggactcttttacatccgcacctgtgaacatattcatcatggcctctgaaaatccgggcgacagcacggtatagccgggtgttcttggtcttggatggcctgtattcagtgactgctccttaaagagggagcggggatattcattgtactctgtcagcgtgtcatagctggatgccctggtgggaagttttgctatggcctgggcgtaagaggtcacattttccttattcatcagataggagataacaacgcctgctgcttccgcgtccgcgttcctggtgatgcaggcagcccagtcccctgtgggagatgtgttgatgccgccattgtcagccaccggaaagtatgtaacgccccagttcagatccgggaaggactgctccagagtggccacttcccaggaaccgcccagcatggtggcgcattttccattgtggaactcctgcttcatggggtcaatattggcataaccatcctgaatcagactgttgaggaaattggctgcttcaatgcccttttcactgttcacatagccgtcggccttggaaccgtcttcacttacaaagtcagtgccgttggaaatccagaactgctccagcacatagggaagtccctcgcccttatccatgatgatgttggttccggccacatcgctggtggtcagcttcccggcaatgtcagcaaactcagaccaggtcagggcgtcctccatcttatccggcatggtgatgccggccgcgtcagtcatatctttattgtagtacaatgccacggaactctctgttgctcccagggcgtacagcttgccgtcataggttccctgcactttgatggattccacgaaatcacttaaatcctcctctgtaaaataggagtcaatgggtacgatgattccgtccgccgcgtaattggatatgttgggaccgtccacaaacagaatgtcaggcagatcattgcttgtcacggccgcattgattttatcctcgtaagcataggaatccgcccgcacgatagcttccctcttaagctcgatttctcccttgtgttcttcattgaaggcattgattttctcaacccaccactcttcaatagccggttcatccgtgggactccagatagtcaccagtttagccccgtcgctgcctgtctttcctccccctgatttggaactgccgccgcagccgctcagtgcacacgccgccaatacagctgccagtgtcatacatgccaatctcttattcttcataatccttctccctctcttcatgatttatggttccagatggactccatggtccatacctccaaacgcttcagacttccggcagcaaaatccgcctccagatgccccctggtgctttcctggtagaaaagcttggtgcctgcggcctcgccgtggtttaagtaaacctctgccaccctccggtccataaaaatctccacatagcggaccgcgctgacatcagacggaaaacggacctcactcacttccttcctggtggataccaggctagtcacaccatttttccgttccagatacagggcgtcatctccttccctggcaagggtcacaaggaaatcccggtcgtctccaagcttgattttcacaaaaaatgagttgcccggaacaatcacaggcgggacatcctgtcctgacactgcgaaaatacgctccttcagcagtccgtaacattcctttaccggctccgtgaacagccttccttgttccatgtgcagttcccttggaagggaaaaactgccgcaggcgcctgtgggcttaacccggtgttcaccgtaaaaatcagatatccaccctatggcaatccttctgccgccgtgttcaaagctctgcaccgcatagaagttgcttccaaaatcataccactgctgatgttctgtcttaaacctgtccccgtcaaaggtcccggtataacaccgtgtcatctgataccggccggcctcatcacggtggcacatccatgcacctgcggccacatatttcccatccagttcaaaaaaatccggacactcaaaggttctgattcccggttcgtgctcctgcaggagaggacctttaaagctccacgctccattctcccggacatacagcaggatagacggcacaccgtccaggctggatcccaataccatatagtccatgccttctatccgctgtaccttggggtccctgaaatcaaaggacgctccctccggtctttcagtaatgcacgggcgctccttctccacatggatgccgtcccagcaaacagcctctgtctgccattccctggtttcctcaccgtcctcctggggaccgtggtgacgggtcagatacagatgcatctgttctccctccacctgagcgcttcccgaaaaggctcctcctttgtgttctttatccctccacaaatccggctgcggttccagaacatagggcatatgggtccagtgaattaaatcccggctcactgcatggccccagtacatatcattccattcctgcccaaagggattggactggtaaaacagatggtaatatcccttaaaccagcagagtccattcggatcatttacccagttcataaagggattgaaatgatactgttcccttacagaagtatcataccattttcccagttccatttcatcaccgctgtccggatccaggaatcttattcccctgtccatcaaatccggtcccccgctcagatacatctgggtgaaagagacccctttacggctgatgcggtatatccccttctcaggaagggccagctgtaccagacggtaccagtcgtcattcatgtgaacctgctgttcctttcctccgggtccttccagacaaatccagccatccctgtcatctgttttttcagcaaatatacagacggactcatattccccgttgtcaaattccaacatccacatcacctccttttatcctgtctgtgtctatttttcctatatggaacccgttccatatccacactatagtactattagattgatatgtcaatatgcttttgtaaaaaagcgcaaaaatagtgcacattatacagctcttcgcctcgtatattgtgcactattttcattctatttccaatttttgtatctatcgtattcagcccttctccgtgttccacatggaacacattataccgttccacctttttgtatggaaacaggcagaatttgttccatctttaccttcttaccatctaacaggtccatcatggtatccacacaggctgttgccagtcccggtatatcctgcgctatgctggtaagcttgggtgtaaacagccgggtcatgtcaactgcgtcatagccaacaatatggagttcctccggaaccttcacacctctttggtttgctatgttaaggcagtaaagggctcctatatccgtagtgaacaccccgtcaatatcccggtaaatatccatgtactgttccatgatacggcaatagtaatcatattccatcatattccacgccatttcaatggttttgacagatgccccattttcctccataacccgattaaattcctggtgcctgtcattggagggcgtatggacgcggaaggaaccgccaaagttcagcacattcctgcagcctgcatccaatagaagccgggccgccatcctgcctcctgccttgtgatctgaatgtattatgggaatgtccggtcccaggttccggtccatggcgaccaccggcttattcaggttcaggtacgcgtaatcctggagggaatgggcaccggtgatgatgccgtccattacgttctggcgcagcatgtcaataaagtcctgctcacggttgcttatctcaatggtattgcagatcatggccttataaccgttcttatagagctggatctccatgtgcttcagcagcttgctgaaaaaaggattttccatatcaggcaccacaattccaatgattcctgtcctgttccggaacaggttcctggccagctcatttggctgatagtccagttccgcagccattgcaaggatttttgcctttgtatcctccgccacatagccagttccgttaagcgcgcgggaaacagtccccacccctacacctgctttttttgccacatccctgatacttgccatttgcccagacaacctccatcgcataaaacttcattacattgcactaattacattgcactaattacatagtactaatatcttagcaggaggaaggtaaaaacgcaagcgggtcccggaaaggtttcggcaggttctggcgggttttggcgggcatctgttttaatatttcgtcaatattcacaattttttctgactaattcagtcaaacacgatattctttcaaaagaatattgatttatatattataatatgatagactaaataccgttataagacaaatatttaacagctgatattatcaggtgattttgttacaattttatatttcacagacttggaacgagagtttggcagccttttacaaagagctgcggctcttgtttttttatttgtgcagacatcagagcattaaatctccaggagtttggcaacctttcacaaagtgttgaagctttcatgaaagcgtttttaaatatcaaagaaaatcaggagggaaaacaacaatgtcacaaaagaacacagcaaccagcacttcaaaattccagcttgacggcaggcccagtatgaaggaggcagtgcctttaggcctgcagcatgtactggccatgtttgtagggaacatcgttcctatgattttagtcgcgtcagtagccaacctgtctgttcaggacgccaacatgctgctccagtgctgcatgctgggagctgccatctcaaccgcaatccagctctatcccatacgaatcggaagcatacagattggctccggccttccctgcatgatgggacttacatacgtattcctgccggcctgtctttccattgccggcagcaaaggaattccctatatcttcggcgcccagattgcggcgggtgtcattgccatcagctacggaacactccttaagaaaatgtcatccttcttccctcctgtggtaacggggaccattgtcatgactgtgggcgtttccatctttaatcttgccatcggcaatattgcgggcggtacatcatcacctgatttcggtgcccccatcaactgggcagtcggcgtattcgtggtgctggttgtactgggattcaatgtgttcggcaaaggccttcccaaggttgcagccatccttatcggtatgacggcaggctacattttatcggtcattctgggactggtaagtttctcaggcattggagaggctgcctggtttgctgttccaaagccttttgcatttggcgtaaaatttgatttaggatatattctgatgtttgtactgctttacttcattgttgccgtacagatgataggcgatttcaacgtatcatgcatgggcggactggaccgcgagcccaccccggatgaaatcggaggaggagccaccgcaaacggaatcacttccattatatcagccgtacttaacagcttccccaccgccacctacagccagaactccggtatcgtggctctgaccaaagtgtgctcccgttttgtaattctggttggctgcggaatccttttcctggccggtctctgtcccaaggtaggagccgtgctgtccaccatccccaactgtgtgattggcggcggtaccgtggttgtatttgcaatgattgccacctcaggcatgaagcttcttgccaaggccggatactccaaccggaactgcctgattataggcgtatccctggcattcggcctgggcacccagttctgcaaaggcgccagcgcccagttccctgccggaatcgctgcaatgctggaggagaacagcgttattctcacatctttgcttgcgattattctcaatctggtgtttccaaaggatccggttgtggcggcagagaaggagggcaaggcgcaataactgtttttatcatagaaaatagcactggaaaactcccagtgctatttttatataactgctattcccttttctggtggttctcatgttgctctgtgtccaacatacatctgcctaattctccatcacctcctgatacgtggcatggttctccagcgcctcagtcatggccgccatccgtgataaatcacccattagaatcacaccgctcatccggttattcaggaaatagtatttccggtactgttccttacccatatccctgaattccactgtcttataatagaggttcgggtttcttccgttgtcgcccgcggcaaacagagcggtattcatgccgtggaaggtcagggccgcaggtacaggcgtgtattccagactgtccccggccgcgttggcgcccgcagtcttgccctgttccaccgcttcgggccagatgccgtaattcccatcatggtactgtgcacagtcgccgcaggcatagatgccggaaaccgaggtctccatgcgctcgttgacaactactcccttctttgtctccaatcccatcttctttgccagctctatgttggcgcggatgcctgcggacacaatcaccatcccggcttccaccacttcccctgttttcaggcggacaccgctcacatggccgtctccctcgatggcttccacattgacgccggtgcggatcaccaccccggctttggatgctattatcttcaactgctccccggagctctcatccatctgacgtcccatcagggatggagccatttcaagcaccgtcacctcaatgcctgccttcttaagctcccatgctgcttccagtcccagaacaccgcctccgatgaccacggccttctccgtgctcttcatcagagcctccacccttctgacatcagaaagccgtctgattgccgccacctccggtaacccgcttccttccatcggcggaataaagcattcacttcccagcgcgtatatcagcttcgtgaaacgcagctttgttccgtcgtcaagaagcgcttgcctggcatccgtatcaacgctctccacccgttttcccagcatctggtgcacctgattttcctcataccatggggcatccaccatagctatctgctccggctccaggcctgcgaccagggatttggtcagcatgggacggttgtaggacggatagggctcctcggataccatagtaatccgtcctgtggcatccctttcccggatggccttggcggcattaaatccggctgcgccgttaccgagaatcagatagtcgtttgccgtgttattggtaaaatcatttgccgcatcctccaccggcacaaagttctcccggcccacgccgcagacaggacaaatctcgatggaggaatcaaaaatctccccgcaaaccaggcatttaaccagcctcctgccgccctttgccgccgctgtccccggcttcttggactgcaccagacacccgaactgatatccgaactcataggcacccaccaaatctgcatccgagggtttaaacctcaccttaaatccgtctaccaccttcattttcaactgtttcaggcgctccgtgatatggggtacgccctcgccgctccagccgtagctgccgaacgctcccgcatattttccgccgtgggtcacgctgaacatgcccagcgtcaaatcccatataggacgcagcgcctcggcaatgatggtgggcgtgccaaacagcattccgtctgcaaactgcaactcctcctgcactttcgccgcgtcggccgtcaccatatcgtagctgcgcacgtcaatatcaccgctgtcggcaattccctgtgcaatcttctccgccagcattcctgtatacccgtaggcgcttacgtaggggatgataacggtcttcttcctgttcggattcaccactgtggaccattcccggtaaagggccatcacccgcttaattctgtcccccaccagcaccgggccgtggcccgtgcacaccatgctgatgtccagggattccacccggtccagggcctttagcataaagggtttatacggcccgataatacagtcaaaatagtagcgcagcgcctttaaataatcgtcctcattctgaatcttatccgacaccacctctttcaggcagtagtgggaaccgaaggaatcacaggtcaccagaatctgctcctcctcgataaatgtgtacatggtatccggccagtgcagattgggaaccagcataaaatgcagtgtccgcttgccaatggtcatccgctggtcgtccttcaccgcaatgctgacaaagtcccggttcacgatttcttttaagaaactaatggcacagggagtggccagtatcttcatctggggactgtaatccagcagccgctccacactccccgcatggtccggctccgtgtggctggttaccagataatcaatcttcgtgacatctatgacctcttttaatttttccagataatcgtcaaaaaacctggcctttgccgtctcaaacaacaccaccttatcccctgttttcatcacataggaattataggtggtgccaaactccgtatacatcacaatatcaaacacacgcagcttgtcgtcaataatacccgtccagcagaacccgtctctcaatttaatcgcttccatggtcagcacctctcctttacatacatttattatagggcatatgttattttatgattccactttaacgcaaatcccaccctgtgtctattgcatttgccacatattggcagtccgttgtcaatcttagccctatttgtgcacttatgactaactgcaataaggggccgccaaaaagaacaatacgaaaaacatgtgtaatatcattggaaaaggaaatctccggaaaaaccataaacatgatttttccggaggtcgatttttaaagagaaaaaacagggaatcgttgggaaaagggtgagtaattatgagatattagattatactggctttttattatattacaaactgctctatgtaacgttttgaaagctttaagctgtccagaatcctttcccggtccgcctcaaatgcccggtcctcaacttccacacaggtaaacccatcataaccaatatctgtcagcgcagacacataacgtccccagtccacatctcccagtcccggaagcttgggctccatatattccagcggatatgccataattcccacatccttaagcttctggggataaaccttaatatccttatagtgtacatggaatatcctctctctgaattcatagataggctgaatataatccatcatctgccacacaaaatggctgggatcgtaattgatgccaaagtttttgctgggtattatatcaaacatttttcgccaaagggcgggtgatgtaaacagattatgcccccctggccactgttctcttccaaacagcatcggacagttttcaattgcgattctgaccccgtgctcctcagcatattggataataggaggccatatccggccaaatgcctcaagattttcttccacgctcttagtctgatccctgcccacaaaggtggtgaccattccaatgcccagcttttctgaaaatgcaattacctttttaaggtgccgtatggcatcctcccgtttctgaaaatcaccgtccatggtattgggataatatgccagggcgctgatctcaactcctgtctttttacatgtctcatgaatatgcgccacgtacccacggctgtcattatccacgtcaatatggcttacacccgcatagcggcgttccgctttcccttggggccagcaagcggcttccacgcactcataccccagtccggcagccgtatccatcatttcctcaaaagtccatccatccaggatggcacttacaaaccctaacttcatttcattctccttagcctattttaattgtttttcctgttttggcagattctatacttgcaaaaactgcttccatagcgctgagtacgctttttccactgagctgtgcttcctttccgtgaacaatacagtccataaaggcatctattacacctgattttgtctgcttgtcattggtctgaatctgatctacattgtacaggatagcctcattgtccggctttataatcttgatgcagtattccgggtcttcatagatacgcataatccccttggacccatacaatatggtggagttgtcttcctgaccatagtaagtccagctggctgtcatagttcccactgcgcctgattccatcttatagatacagatggcattgtcatccaccccgatcaggtttccgctcccatcttttttatccagggtggtaatcacagctgtagtctctgctacgtattctcccatcaggtactggatcagatctgtcttatggattcccaaatctgccatagctcccatggcagccttttttttgtcaaaaaaccaggtattactgccgggatcaatgctccagctttccggccctccatgtccaaaggtagtcttaaaggttataacctttccaatatccccgcgctcaatcagcttcctggcaagcgcatggcctttggctagtctctgattctgcccaatcataaggcattgtcctgttttctcagcagcttctgccatctggcggcactcctcaagggttactgccattggtttttcgcaaagtacatccttccccgccttcagtgccgcaatggatatctttgcgtgaaactcattgggaacacatatggagacagcgtcaattttttcatcctccagcagttcttcatatgtctcataaactcggcctccgtatgtaccggcgagttctctggccctctccgggttcaggtcataaaacgcatccagtcttgcgtcccggtggtctgcgtattccggaatatgccttacctgagcaatccttccgcatccaatgattcctatacttttcatcatgaacctccctaattctttgtgagcatatggactctgatggcgctgattcccagagatatgataatcagggcgccggaagcaatctcctgaagataagagttgactcccagtatattcagcacgttggagataagtcccataagcagtacgccgaaaaatgttccaacaatatttccctttccaccgttaataggtgccccgccaattaccaccgctcccatggcctgaagttcatatcccgctcctgtggaaggcagggccgagcctaccctggacagcaagagaacagcagccaggcctacaaaaaagccattcagggcaaagaatataagcttattcctggtcactttgatacctgacaggaatgccgctttctcattagaaccaatggcaaagatacgccgtcctatctgcgtataccgcagtataatgccaaccaccacacaccccatcaggctgataataaaaatcagaggaattgccccaaacaggcggaaccggttcattgtgtcaaattttccgtacacggtctgaatgactccttttgtcagatagagggccgctcctgtatatacgctggtggttgccagcgaaattataaaggaaggcgctttaaaaagaatcgcaagtaccccgttaaaaaacgtacagaacatggctgtgaggatgcccgccgccgctgctgcgggaatggggatccccgcgttcatcatcatggccatgagacaggagcttaatccaatgaccgctccaaccgatatatcaaaattccctgatataatcaggatagtagcgcccgcagccaccaggcccagaactgcaatctgctcaaaaatattcatcacattgttaagcataagaaatctgggatttttcagcgccgtaagcacggatatcagtaaaataatcaacagaagtatgagccactgctgacttaaaattttgtatttcagattatttctgtccttcatctgtccttcactccttcactccaatatactcttttatcagcctatcttctgtggcatctgccgaatccaggatacgcaccagccgcccttccctcatgaccccaatccggtcactcatggaaataagctcgggcatgttggaggataccataattacaatcttctgttcctttgccagtttttcaatcagcttatagatttcctctctagcccccacatccacgcccttggtgggctcgtcaaaaatatatacatccccgtcctccagaagccatcgggaaataaccaccttctgctggttgccgccgctcagatttcctacctcctgctcctggctgaatacctttatcttaagctgctgtatgcttttttccacaattcctttttcctttctcagattcagaaaaaaagaattgtcgttttttgatatagtaagattttccctggccgaacgtatcagaaaaagaccttcaccctttctatcctcagaaacaaggaatacacctctttttacagcggattttggagtcgtgggagtgatatcctttccatccagggtcagggttcctgaatcccttttatcggctccgtatatcatacgtaccagctccgtccttcccgcgcccaccagaccgcccaggccaaacacctcccccctggacactgaaaagctcacatcccggacaataccgttgccggaataatgcactgcctcaagggccctgtcaccggatgaaaaacttcctttctgatagaagttggatgcatcccttcccaccatggccttaatcagctcatcctgatttgtctctttcagtataagcctttttaccattacaccatccttcaggacataagccatatctcccagacggaacatctcctctaaataatgggagatatagatgatgcccagtcctttttttctcagctgttccaccagattcataagagatgcggtctcctcctctcccagagaagccgttggctcatccatgatcagaatccgtgcttcctgatgcagggcttttgcaatctgaagattctgtttctgtcccggtgaaagctcttccacaagcatggaaggcttcatatccatgctgaggctctgaagcagcttccttgtcctctcttcctgctccctgctgttcacaaaagctctgcccctcagcctttcatttcccaaaaatatgttgtcggatactgtaagggagctcacaaggtcggcatcctggtaaatggtagcgattcccagatgcatggcctgaccgggagtcatccgttcatatgtggttccaaatatagtgatttttcctttgtccggtttttccgcgccggaaagtatcttgatcaaagtggatttgccggccccgttttcacctgccaggcaaataatctgccccgcctccagctccaggctcacatccttcagtacctgtatgccggaaaaggatttgcagattccgtctatggataaaatatttcccaattcctttccctccctttatctataaatggggattcatatgaacccccacttaaatgtttcttattgcattaactctggaaaatactcttttgtcaaatcccagtaacattcatccacttcccatggcactaccttggtcttgtcatcaatattactctggtccacaggcataatgggaagttcaacctgctgctgaactgctgtgctggctccggttgcgtactgattcagtacctgataagaaacaagtccctcccaaccaggagatgatgagatggtataatccagcttgccgttcttaataaggggaaggcccgcgggagaaccgttctgcgaaaccaccttatactggtctgacactccctgagaatccagcatttggataataccggctgccatgtcctcattcataacaaaaataaccgaaaagtctttgccggaagcaatcgcatcctgtgccaccgtgatagctttgctgggattatattccccttcctgaatatcaatgatcttatttttacccagttcatccacctttgcctgcatagcttcatttatcctctgacagggcactgactcaaagtttcccgtgattacaaagatattttcacctgggcagttatccgcaaaccactgtccgtaattgttgcccatctctgtccagtcaaagtcaatagctgcaacaatgtcgttcccattgttatccagagctgtccccacactgtccgttgacaccagcggtatacctgcctttgcgcatttttctgctgcgattttagctccgctttcattaaaagaaaagatacacaacccgtcaacgccctggtttatcatggaatcaatattggagacttctttgctgacatcgtagtctgaatttaaaataactaccttgttgccatccttctccgctcccatctgaaatccttccacattgcgctgataccatgtgtcaggccccggcgtaatataaccataaaccttcccccccgcactttccgcgctggactcctctgcttctttgggactggcctgctctgcctgagacgtttcttcctttgccgcggtctgtgctgcggttgttgtctctgtctgggatgaaccagaacaagcagtcatcagagtcattcccgaaaccaccattaatgctaacagtccttttttcatttgacaccctccttagttaaatgtttttgatttataattatatatttataaattctccttcagaaacttcagcccctctaaggccagcacatcctggctggcagccaggggtctccacagagaaaccgctttggcaatctctgttatatctgtggtaaaagattcaatcaccaccgcgccgtcgtaaccaacatccctcagcgccttgctgatttcatcccagtcaatatggtcctgtcccggagttccccggtcattggaacatgcatgaaagtcaaacagcctgctgcccgccctgcggatcgcctgccccaggcttttctcctcaatgttcatatgaaatgtgtccaacaacaaacctacattatcacatccaatctcatccagaagttccaccccctggtcaactgtgttcagaaaatccgtctcaaaacggttcaggggttcaagggccagcctgattccttttgtggcggcatagcccgcaagatccctgagattatctactgcataggatctctgccgtttccgttcttcctctgaagccatccttgccttaccggttgccgcatacataggtcccgccacatagggtgagccgaaaaccgatgccatatcaatcagcgtcctgatatactccatccccttgcccctgtaacgggaatcatctgagctgatatcccgctccgggccaaaggctccgcatatgttaatctgtatacctgccatatcagcttcttgcttcacataggccgggtcaaatgacgagggatcctccacacctatctcatagatgtcaaatcccagctccttggcatgctttaattgttctgtggtatgatttgaaaacggggatacccagacataggaacttacaccaaacttcatttttcctccttttcatgtattttacatttttatgtaaaattatttcattttcttctagtttttatggctttttcatttaatactatatctttttttcattttattgtcaatactttgtaaaaatttacattttttacatttctcctgtacatttcttctattttggtgtattctaaatatatcattagattgtgaggtatcagccatggcaacaaaaccaaccatttcccagatagcagatatgtccggtgtctctatagccaccgtatcacgctttatcaacaatacaactgcagtcaaaggcagcactgcaaaaaagatcatggaagccatccattcgctgaattatccattgcctgaaagctttataacaaccaatacaaaaaaggacggcaaggtcatactgatcaacataccgtctgtctccaatccattttacaatgatgtgatcaagggagcacaggacgcggccctgcgccatgattactacaccctggtaaatgtccagcatcttaattcatctactgaatcaaccttttttaatctgttaaataacattaacctctgcggcgccattatattaaacgccatggaccagggatattttaacagcctataccatactattccctttgtacagtgttgtgagtatacggaaaaccaggacctggtctcctataccagcattgatgacgtggcggcggccaagacaatgatggagtacatcctgtccaccgggcacacaaaaattgcttttctgtgcggaccggaccggtataaatatgcccgccagagaaaagctggatatatacagacactggaagccgcccatatccccctgaacaaggactggatcattcagctgcctgaactagactttgacatggccctctcctccacgcaccagctcatgtcccagaaggagcatcccacagcagtgtttgcagtctccgatgtacttgccgcagctgctatacgcggatgccgcctggccgggctttccgtaccatcggacattatcgttacaggatttgataatgtgaacatatcccaggccacgtccccgcccatcacaaccattaaccagccaaaatatcagatgggctacatggcatgtgagctgctgattgaaaaattaaatacccctggcgcaaaaccgcggcaggtactgctgaacacagagctcatcatacgggaatccacacagaggcagcggacctagcaccagaacatcccgaatcgggaagcatactttggagtcaaattggactcaaaagggcgtcctgccctcgcagaacgcccttaaatacgtacttattcacttaaaaatacttcttgcttccccttatattaaaggtattttatactgtcccgctatgttttaccacttactgagaaccgcataattacgttgtttacagtttatagcatattacattttattaccctttcctccacaattggagtcaaattggagtcaggaaagaatccgctattttccaaaggaagacacatactgctccactgcattcaataataactcggcagtgtcaatttgttcctgggcttcttcaacggaagcgatatagaactcgtcataatcactggcgtgacgaatctcctgggccctgccaatcctgcggccgagttgtctggaaaatttttctgtcttgacatattctttattaaaatatgcaattgtgtccttatgccgcttaaaggcaacctgctccaaagctaatactgctgtaatcgaatgatagattgaataatatgctctgttattagctgctctgaaatgcttaccgataaaatcatcttttgcagttgccaaatcctcctttgcaactgtaagacggtgaagagcaaggtccctgggattaccactattaggcaacatacaattcgaccccctcatttttcacattcttataaaaagggtcagccggaagccagtactggaaatgattaacattttttacaatcggcataatcataatgtcatggtccagattaaaatcaaaggttatatcagaaaccatacgccctttctgttttatggtatcctccgtcgaatccaccagaatcataatatctatatctgaggattcggtataatctccccttgcataggaaccatacaaaataacagcctttaattcactcccatatatctcatgtattctattcacatactgaataagcacatcttgagtctggctttgcaaaataccacctcttctctgttttttagggatatatcacaactgtatctcttttcattatatccgattgatggataccttacaacattttccggaatctaaacagaaaaatatcaactgattctcaatcttccttcaagagcctccattgtaacctctatatcctttcttgaataatggttatatacgtccatagtaatccttatatcggaatggcccataatcatttgaattgctttatagtcgtgtacaactgcacataagcggctgcaaaatgtatgtctcaaattatgtatgctaaacggaggcaatagtacaggacttcttccctctttttgggcctgctctatttcccatgtattgcagtcctttataatggatttaagaaagttgttaattccaccattcgtatacggtttcccactttttgtaaggaatacaaaatcgctgtatccatccactatataatccgtaggtatctgtctcgctataatataacgcttttgctctactaattgtctcttaacctcagataagatggggatttctctattaccgcactccgttttgggcttactgatataaaagcactgctttccttttatacttttatactgaagcgtatgattcaccgaaatatatcctttttttaaattaatatcacaccatcgcaacccacatatttcacctgaacgcattccagtccccaaagccaaaacaaacagcggaagatggtatttatgtctgttactttgtttcaggaaacggataaacatctcctgctgagactccgataaggctattctctttggacttctcctggattcaatatacttcatgattcctgcgcaatagttttttcgcaaaaggtcatcgtcaacagccatttgaagaacagggtagataatattattcaacaaatgtaatgttccggctgacagaccttcttcatctgacagtttattgaaaaactgttttaattgtgaggttttaatatctttcagtctttctgctcccagtgtgtcctttatgtgttttcgccataaatgctcataattaagcttggttgatacagataatttagtttttatatccatccacagatgaaattgttcattaaaggttatttcagcccccttcgtatttatattatccaactggtcacgttttatgttatcctcaatttcgcggagactaggttcatttacataaatttcatccaccttatccgttgatgttaatttatggctatacacatgttgccgctttccaagcttatctgtatatcgatacatatatctcccatcttcacggtaccgttctcctggcctaagtactcgcccttttgggtctttgcgtttttcattacttttcactgcaatatcctccactataagagttgcgggagaatcatcttctcccgcaaacaattatttatccagttattgaatctaagtattcatcaaaccgctttctattaacgaatatatgccttccaatataaactgctgctccggattcccgcgccaatttatatgtattattttttcctatcccagtataatcctggagttccttaattgtcagcaatgctttttcagcgaaattcttctcctgcatcagattatctcccttccatatgacttttcacagctcttaagtatcttctaaactgcattgtccatttatactgaaaatcaaccacctcatcacaaataccagtatacatatccgctaaatattgttttgtcctattactttcctgctttagaaattcctcaaccagcggctttacaatcacattgtttaaattcaagcatacacaatctgtttcaataaatgaattgtaggtaaacccatctacaggataaggaaactgattattgtaggttttatcttttcttaattcaccgcagataattccagcctcccttaatctggtattatcaacctttacggaccaattccctgtatagtggtatttctgagttatttgtatcatttgcggtgtcaatgcttgtataagtttatctacgcgacagataatagccggacattggaccttggattcatgttcaataaaaacatttatatctggtatccacaccccatccatatcgcattctataatatagggtttgatttgcagctcgcccgaatcagaatagatatgtataggattttgcagcttcaattggcccaccacttctcgatatgcatccagcaggatttcatccttttcatttattagcaatgcggttcttttcattagcatttctaatatctggtcagactgttttaaaaacatttcaacatcaaaagaatcgtctgcaccacatgccttcgcaaaatctgctacaatgcttgctgtcaactgtaaggatgacatattatccgccaatctggactgatttgtaccataaaatatcctcttatcctcttcccatagattatccttagttttcaccatttcagtccaatatatatcatccatatatttgcaacataaatattgcacaaaatacgccatcaaatccgaaaggatatgtggattatcctgcaaccgtcgtaatgtcagcgaatattcagtattattaatcaaatcatctacatctaaatacaccattcttgccatagacgattgataagcatccatatactcaccagtaataatggctcctgcatccaaattctcctcaacacttgctctttgagctttatcaaaagattctaacagcttttgagatttaaccgacctaatacatatatctatacaagttctggtattttccctttgcccctgagccctttccatcttcgcatcatccaagataaacacaagacctttatgttgaaacagtgataggttcatatctctaggcctaccaaatgcagaaaaaagtttccttgttatttttgtccgattataaatatccttattaagaaagcttcccaaagcacaagctaattctgtcttgcctgaccccggccttcctcccagccacataatcaaagccggagcccgtccattatttccaagtatcttattcaataaagctgctatattcatgaaaaacacaggatataaaacctcagacttcttccccaatatattcataagctccagaaatctcattctggcacacttcattgatggggtaaatgtttcagacacaattaagtcaaatccttctatgtccgcaaaactctgataatttattccatcaggagtgacgcagcagttagaaaatgcaaatacagtattttcgtccatcatgttccatccgatatcaacaaaccgataagcgttaatgcctcgctctaatgccttgcttatcgccatcgccaattctccctgtgctgcctttaaatcacttgcaccatactgccgcagttgtttcaaatattttgtctctgacaccccttcttctggtacttctaacacccgctccgcaagacagcctctgtcatccatgagtgtcaattcatatcggtagtttattattttgccttgctttactatagcaaaaacttttacatcatgaatcatttatgatatcctcctgttttacggtgggccctaccgatttctttgataacattaggataacatatcttgaaaattatactatagtgaaatattctacggattttcactattgacatcatctaaaatgtcaaaaagcctatacctaattaatctgaatcgctttgaggcttcttaacaaactctcctttatattcttgccctgtagccagcttaaacacttccttcgctggtatcatttgtgaatagagtatttcctgggctttgtcatataaatcctgctgaaactcaggataatacttctctataacctgcctactaatcatatctttacgtttatatattgcctgcgttaaatcttcgacctctttttgcagtttagaaaagtatggtatcttcgattttttagcatctacttttttattcaataatccacacttttccttatactttcttagtaagtcacaatattcctcgtcttcttcctcttgtctatatacttcttcctctataggtccatcgaatgccattaatgcctcatattcttctggattttcattttccatctttgtgagttttcccgaaaattcctgtttccgaatctcaatcatcttatcgaaatacactgtccactcctgttctaatttatttaaagccgtttgaaatccgtttagccactcatatctgtctgatgctgatataaaattaatatcttttatctgctcatctaaattatccaacgcgttgctaatcatcactcttttttttctaacaggataatcaatccgattgtctagtttaaccatcacttgctccagctggacaccagtaacgccagcattaataaatgtatttactataccttcatataatttaacaacaaacatatcgctcactttatctacatccacttcagcccttcttaaatggtccatttcagtatcactataattttctaatatataacaccagaatcccatgtctctatcgtcaaaacagtaaccacgttttttaatccattttatttcatcagctatatcaagcgtttcacaaatgtctttaaaatttttaaattgcgcttgatagaaatattcttgaccctcatcatctacacattcaacctttttagaatataacctatttgttatatctcttaatgtacatcccatggctttctcctctttgctaaatatagttttaaaaattatatcatagaaatatcaaaacttgtatatggcagttattccgtactctaaaataacgaaaatacgaaaattcaaaacattttatctattgaatattttgccattttaaatagtccgatatttttgagaataccggaccatcgaattttaataatcctgcatacacatactataagtatcacttaggctactacctttatttctttcttttccaaattatactcatacaccctttcggacaaaatatcttccatcggaacctctgtaccgtttatgtattttaccaacttcataagtgctacaaagtccatctctcctgtgtcttctagtaacaaaacttcatgcacgctagatggcagaataataatatccttcccacgctgctccgcaaaattcgctatcattccaggatagagcatacaggcagccccattgattccactgaccgttgataatacataaaatggcggttcttttccatcttcctcaatttcctccccatatgtgcatctaagattatgtattatttcatttatgctcttgatttccgcaggcattacacgctgcatattttgcagtgcaactttgtacaaaacttggacatctacttcccataagtcaagatgtcctttctgaatctgagctaccatcattcccccattatcctcctccatatataggtaaaacacgatggacaggtccatatatggtatgcttggaatctgtttcaaaagcgcttcattattctttgtattaataagcttaaatcgcactttatcctttattttattgaattcataaaaatcactttccatctccttgataatctccggaaccgttccatatgtcatatatttatttgtaatctcctgggcagttatttccgctgcttcttcgcacagcggctctctatccatatactcattcaaataaaacacaggagctgctttctctccttcttgatgaatgctgattccggttaattcgattccattatttttccgtactatctgactccttacatcatatgcctcccctaaccttacttttatgctgctcataacctgatttgtatatgcttccaatgtcattttgtctttcctcctctatcccttgattcattctttagagctcttctaccaatttcagtaattcccctatcagtcctaccacatcctccacctgttccgattcctcttcccccatgcagcaccagttcgcaaaatgctcacagttattcagaactaaatcatattcttcctctcccagacggctgaacgccctctcccttatctcatcccctgtatacggcgaatcggaatgcggtactttctttaccggttcaccacgggaaaacttctccattgtatccacccttattccgtcaaacgcatagtgaatcaccagcccttcccctatgtagattccatgatgctcataaaacatccgctttgtcttaatatggcttcctgtttcaagctctgtacaatccatgtatttcccagcctttcctctttcatttttcagattaaaaggaagccacccatccgcttacgaatcgtggcttcctcttattctttcattgctatacacaaacttctccctgtctctgcatatcatatccctgccggcatacagatggaagcatgattagccattgcctgttttacctaaacgccctgtgtccaagccgtaacccatccaggaacgcctctttatagacctccaggcattccttggcactgatgcatatcatattgctggcaaaatcctcaaatttatccttgatttcctggtccagaccttccattatcttctcctgctcctcataaaacgtcttggtgcctttcaaatcttcatgcagaatctgggcaatccgttccatgatagactcttccagaaaactgtccgcttctggttccctgccatatccaccttccattatgcagcctcctgcgccgtctctgccgaaaggcagtcgttgcgtatctcactcatgtccacagaaagtcctgattttactgtctcgtccaatgacagcgccttctggaaatcggaggatatgggtgcatatttaagcgccctctttataacagttttctttgccatggattcaaaatcctctgtccagggactgtacttgctgccaaaggattttgaatatctcgctgcaaatgcatccatctccgccttgttgctgacctcgaacccgaagcctccattggacagcttaaaaagtccgtaaatgaatgttatctgcccccgttcctcatgccccggcttatggaccaggctggaatcaagtccgtactggtattcaaaataatcatattcccggacggcctgggcctggatgatttgtatctgcccggtacggtaagccaaatcaatcagtcccttatagccaagctggaactggcattccagggttcctttattcctatatggtatcagatatgcctgtcccagcggtgtatttggttccatcccaagctgcgccgcattcatgagtgccgctatgaatgacatcggcgtacagtctgccagttccggggtattgttgatagcagacagggccatccgtgtaaaccgttccggggtaatgacggcgggaagcgcccggcgtatctccggctccagcgcctttaccatatccacaattgtcatacttttcgacagccttacctgccctgtctgacttatgttcgccctcttctccagttcattctttacatccatcctcttacatcctccttcatgctgctgcttttaccatgaacctgcgggaactggtggtcctgacaaagtcctcatatacctttggacattcctcccggatacgcttggtatccagcctcgatgtatccacatttgtccatgatatcctgtaacggtcactgaacgcagtttcattgtccttcatgtacagcttgatttcctgctcaatctgtttctgctcctgttccagtttcttgaccagccttacgatttcttcccggcgctccaatttttcatcaaagcctatcaatggaacggctgagtttttccttgcctggtgaaaatactgttccagtacctcatcgcaagcctcagaaccatccggggccggcatcacctgcacatctacatgatgattccagaaatcatcctcaatggcaatcagattccgtatcatcccgtcatcccaggtcagcttcctgtactggaacccctggcccaggatgaccacggcaatgtaccagttccgtttcccggtcacggccatataatgatagcactggaggacatagtgggccggtatttccccatccttccatttatctgcattgtaggcgctggcagtcttgcattccagacccgcatcctcccctacaataaaccggtcaacatctgccagcatgaaaggataccggctgtttcgatacatcatgttgcttcttcttacctttagcccggttgcctctataaaacgccgggccacatattcctccaggtcccgcccctgccgcatggcttcattatccaagtccgtagtctccgtacttattttatcaaggtatacacccatgggacttacatatggattcagcccgcagattgcccctgcatccgagcctcctattcctgtcttacgtctctgcagccattcttcgtgtgtcatattaagcgttggtattttagttagcaatcctcctatacctcctcatattatttcttaaacaatcggatgatgatttcaataatgataagcggcatcaggccacctcctcatccgaatatttgattctcccctgttccttgaagctatagtacagggaatcttcaccgaatatgatatggtcaatcataggaatccccagcatcctgccgcattcctccatccttgctgtaatcttccggtcctcctctctgggttccggatttccggtcggatggttgtgcaggctcatgatgaaggccgcattattcaggattgcatgtttaaagatgtcccggcagtcaatgcagcagacattcaggcttcccacggcagctatctccaatgccatgggttccagacgggtattaagtgaaagcaccagcatcatttcgcggtctgccattgcaaacagcgggcttaccatctccactgccttaaccgggtcagtcatccggttcatcccatacagggcacgcccctcctttaccatctgaaggcgcacaagccctaccttttttctgggaatggggcgtctcatcatatcctcaattatctcattcttcgatttctggttcatttctcctcctcatgtaaaaaccgggaatatccaggcttctgcccgtcattcccggtctgtaaaatatggttgcggcttattaatcagggtatccatccaacattccttcctgtcatgctgcctggagcatggcatacgccttatctatcatggcattcccctcaatcgtccttgcaaacaggctttccctataattagcactttcccgcagcggctttgcatgtgttgcgaaatcagataccgcattaataaaccggtatccattccttcccacactctttaaatcaggcgcatcaaaatacctggcctgcatatcctccttcatgcgggccaggttcttcttctgctggggtgtcggctcatcatacaatgggaataatgcgtcaatgtattctaatacctgccgttctgacagctttatatggttcatccggtcaatctcctttcccagttctgacatatattggtctgcgtacagcagggtataccgggcatcctccagcttacctgcaatgtctccggtatggttcgtggaccaggaacgtcttgccgtggagagagccagattcagtgtattctggcagaccacgcgtaccggtgtcatggccgccttaattgcccctgtgccatcatgtgtattcatgaataccagatacggcgtgatttcatccccgcttatgatatagcgctgcggcagctttgcaagaagccaggtacgccttccatcttggagggaacctgccgtttcataagtaacgccctcgcccaacagtttatctgtaaaggcgaaggcgtcctcattctgtactaccttatatcggtctgtcactactcccaggacacggttgtccgtatcccgcatgttggccttgaatcccggaatctgaaacccgtcccttgtttgaatggatttctggacgacccgccagtccaacccagccagccgaagggcctccctggaatccggtgcctcctcaactctggtccccaggccatgccagggcttctcacgggtgtaaaacatggtttctacgtttgctgacatatacattacctccttgaaattgattggttatgattgattcaaggggataatatatattcaaaaatgtccgagatacaattatgtctgtcctgatgttgcttaaatccaactctttacaaatctataaaatcatattcacttccccgtatccgactaataaactcattttctataagttctctccaacgttatctcacgctgcataactcacttatttttaagtaaaggtaacagcattgaaccaaaaatagacgataagtaaaagtatctttcacccatcactattattagttaatattctcccaagtcatcagaatgccatgtatcaaagatggtatcaatacttgtaccggctggatatacagatacttgccatgcatcaatatacggtgaactaaccgtagcccatccattttctacgccaaaactatctgtccaggtattcacttcgccatacacagtaaccaaatctccatcttttatagtaacaaaagatttgtctggggttaatgatacagtgtagtattctatggcctgctcactaccttgccattttccaatgtccattgcaattacaaaggtagtggtacccatcgatgtttccacatcactaacctctccggcgaccctgccgctaacataattgtcatacccaattaagctacactgctcattcaaataattgtagtttagggttatatatccgtgattgtaatctggtactccatcatcctctacagatgaaacctgctttaccgttataggggcagatgcgccaatcattggcatggcatatgctggtaatgtcatcagcactactgccaaaattattgttaccatacttttcacaaagagctttctcatcttcttttacctcctggcacttaaaaattcttctcggcttttgaatagatattcttcatatacatcttatcccacatacagtttccatttccatatacaataaatactttcatattataaaaccttgcaccactaactaatacaattattatcaagctaagtttatagagtgaaccttatccattactttatctttcatggactttaaagtatcaaatgcccttagtgccagttttttggccccctgtgccactttcttggctgtagaatagactttctcaccaatgctgcttcccgttgcatagctcaccatgcccgctaccagacctgctcctacccctacagcccctcctaaggcaaatccttccaatgcaccttttgccagtgccatgcacatcattccgccagtcatggacacagtaacccttcccatacaatccatccctttgactgttgacaatttaccttcggccatcttaaaaagaatctttgcattctccactccaacaaatgctatgttggtaattacgtttgttcctaaagatttagacagaaacggtatcatctcatttcttacagccacatgtaatgttcccgaagccacaacctttaccccggtatccgttcctgaccttaatgcagtttctaccatttcatctgtccgtatttctttgccctggcacacttttgcaatcacatcaagccctgttgttaccgctaccatctgtaatgcagttacaccagcattttttccaatggataacgcatattccttagttgaataataataatcgtccagaacaggcataatgccatcttcctgagcctgtttctgtatctgcttcatttcagcttttgtaaaagaacgaccctttacaccatttacttcaatatggtccgtgatggttttctgtgaccctttaagcttaaaatgattccgaatctcttcaagctgttccgaaggaacaataatctgttgattgttataattccccctttcaatcagcccaatagtagccttggcatcttctccaaacttcaactggtaattctggaacttgcctgtttccaggttcatcgcacgcacatcaaccgaattagccgtatttacccctcggacttcaaccttaatatttttattctgtatatacccttgaagttctgtcgttctggctatcatgtgctctgcaatatttccatccaaattagggctcatcataatatgaccatccgatgaacggctaagtgcttctgccatttctagattttggcggtacagactattgtcaaaatcccttagaatacagctatactgatatgcgcttaatccgattgctgattcctggattttttgttccaaccaatgttcggatgaaattccctgtctgccagcatcctccaaagatgacaaatcatgttcgcaaacatcaagcgaccgtaagatttctaatgcctctttttcagcctgttctctggtgatatgactgcattttctcatgattaattctatcagccagtctccatctgtcagattagcacttcggttttgatagtcctttaagttctcagaaaactcctgattcaatttccggcattctttttcctctatatattcttttaccattacaaatctccttgtattcagaccccccttacctagcagcatttttatacttgcgttttttatattcatccataagggtcttcaatgaatctcccatcgttcccattagcgagtttgtctcgtctatggcctgtactaaatcagccgttgtcacttctttccggttttccgaaaaagctgattccaccgcctctttcaccactccttcgatatcggcaccactaaatccatctgttcttccagtcagtaagcctatatttattttcttcaaatctgacggcctacgtttcttaatatgaatttcaaaaatacactttctctcttctgatgttggcaaaccgatataaaatatttcatcaaatctccctttacgcattaattctggcggaagtttcgtaatatcatttgccgttgctacaacaaatgtcgggctggatttctcctggagccatgtcaggaaatacccaaatagcctggtagtcacttccgcactgccaccattactaccgataccagcaaatgccttttctaattcatcaatccataatacacagggtgaaatagcttccgctaaggcaaccgctctcctcatattcgcttccgattcccccacatattttcccataagccgtcccatatccagccgcagcaacggaacatcaaataaatgggcaattgcttttgcacttagggacttaccgcatcctggaataccggctatcagcactcccttcggcatgtccaccccaaacgcctctgctgcctggatattctgaaatacctttgcctttttcttaagccagattttcaaattatccaggccgcctatatcatccatcgattccttcaatggtatcatatccaggataccagcctttttgattgtctgctgcttctgctcaaaaatcaatcccaaatccttccgcgtcagttctccatcatccgaataggcaagagccagaagattacatatctcaaactcggacaatcccttaaaagaaactgcaaattcattcagcaattcgtcttttatcatagggagttgattctcttccataaaggtacggactaatgctttgatttcctcaaccgaaaggtaatccatttccaggattgttatgtacttctctaattcaggcggtattacaaggacgcttgaaatgatgatgattgtggcatctgttccctgattaatcagattcactataatcttaagcttggcaataacctctggttcactaatacaactatggatatcttttaagaccataattttgcgttctatttcatccttggataaaaacaggtccagaactgttgccaaactatttgatatagtaagctggggattcttggttttaaaatcgaccagcccttttgcaccattccactctaagatttcttttcccatccctagttcttcaatcatgctgtcaattttatcatcctcgaagctgttaatataaagaatgggaaaaccagcatctatatactggctgatttttttaataagtctcttttgcatctctaacctccatcccccttatccgatgaatcatgattcttaggactcaacactagcaaatcttctctattttttttatatatcggttgataggcacctctgtatcctccaatacttcaccattttggtctttaagaatagcagccaactcaccaagaaatgatatgctactttccaggaagcttttcttacaacctatttctgttcgttctgtaccatctaagcgaattctgtatgcccccattctaaaataaggagcttttgtctccaacaaatataaataatcatctacaatcttcatctggtcgattacaggcattccgtattcaccaatcgcatcccaaaggcatttttgccgtcctgttttcatatttagaaccataagttttgggtcacgattttcatagctctccgctccaatataaataatctctttatcatggacgcaaaatgttccgcaaaaatattctataaatatttttgatgcaggcttaattgtcttacgtttaatatcatatacataaaaatagccctccttaccaaatgggcaccctgaatcgtttcccacaaagaaatatattttttcttcgttataatcggcataacgacatccataaaggcagttgatacaatcattcactgtctctggaagtttaattggaattctaagctccttctctcttctctcccccttaaacaaaatattaccggacacatagccagatgtacaccaatccagacaataaaagccttgcggcatctccatatatcccatcagagaatttatatctatctctttcacatctcctgcaacagatatcatttgataatgttcactatcatcatcccttgaagagtaccgcgccaaaatatggttttcagtaaattcgcagctccaaagtgattcttcctcctcattccaacgtcttaatacttttacattttgtccagttacatccattacacctacaaattgtccctgaccatcttcagcagaaaaaacaatcttgttatgaatatatgcggcatctttatatcttaaaatttctggtgtattaattttcttcaaatttatcttatattgaaaatccatactaatttcgtcatcttcatcatcttcttcgtaatcatcttcttcataagcattatccacatcataatgttctgtttcatacggttcaccttgctttgtagcatatacaagaaaattttcgtcttcataatcttcacgacctctgcacaaaaatactgcatgtacatcctcacttatttctttgtcaacaaccattgaaaaagttggctcctcttttaataaatttataagctctatgccatttttttcatatttttctctctcattttcggtaatattcagatatgtattaataccaatatatgttatatgcttctttttcactggtatcctaaaatccgaaccgcaaagataaatccgagtcctcccttcgtccagcaaatcagccaattcttcctgcgaaaaagctacgctatcaatattttcaattatttcctcatcatctgtaatttcttttaatagactaatttttcgattacgttcttcaatttcctcaacactcagcgcatcatcttcataatccacaccaaatagctcacacagtcttcttcccaagacgggggcatcccggtccaattcctgtatattgtcatacaattcatcatagtacctatctgccaaccatgtatccaattttccatcaagataatatgtcataacccgttctaaatcaaaatgctctttcaattccgatagcgtcctcacctccacgtcatctctcattttcatagcaaacttaatctttctcgccatatcccttgtctccttcattctttatttttttaaatactgattacattccgatgcgctaagcttcctaattatttcaaaagactcaattttatcaacacagtactcattcattccttctttttcaaaatctgctgcttctaatctgaaactataattctcaaagaagagtgcaaaaggcacaatcactttttcctccacttcttcccaagggctctgatatcgtatttttattatcacttttctttttatacactgatataagtcccattgcatcttcaatattgcatattcatggctacttccatcgtattctgaaagcatttgtcccaattcatcctgcaaattacgattaccatgctctgtcaattcccttagtgatttcataagcccattcatctcgtcctgacgcagtgccttacttcccaacaagattgtactgattgctgtatattctacctctgtcagtatctttcgagtaggccctgtcatataatacgtattactcgtacggtcaaacacgacttcctgacccgaataattctctgacaaaaagtttcttatagcttctatatctcggtcaaaggttcttgtattaatatctgtctcaaaacagaatgctaccttacttattcttaatccactatataatttccaaaaaagcattaatactctttcaaccttgtccatatttctttccccttattcatagtgctatcatacagggctggtacgacacaatatgtcgttgtaggataaatctttgagttaagacaaacattatatatgtctcataactatataaattatagctatagataattatattgtgaaattggacatattacaataaggaaaaataaaaaggatgtaaaacagatgcaggaactcaactttaaacgaatcggggaaagaatccgcgaatgccgggttaaaaaatgccttacacaggagtatatttctaataaaattggtgtgaacgtttcccatataagcaatattgagaatgaccgggtcaaggtatccttgactaccctggtctctatttgtaatacccttggaacaacagttgattatatcctggataatgaatacgtatcttctgatgccatagacagagaaatcatgaaggaactggcctcccgttcccctgagatgaaagagaaaattttacaaatcatcaggattctctaaccattcaataattcttccactaattgcatcgttatatcattaaacaatcgccctcttttctgcctataattctcagttgtattccatttatgtccattctcaagacatatagaatttactgcaaaatgaatatgataatgcccggtattctcattaggacaatgtactgcatatactacctgatgccctttttcccaatatacatcgcttaaccgataagccagttcctccatattctctctatcaaataaaaatgggcataagcctattaacgtatcatttagacaataaaactcatggtggcaatgtctgccatatgtatgacaccgcggcttatacatcccttgtatctgttcaaattgatgaatcacagtttcaatgccctgacttatttgaacacctctcgcccctattatgagcaaatcatcagattggttgcttcttcttccggttctcgtaatatactcaatcaatttacgactttcaccgtagctattaaattcctgctgtggtacaattattattccgggacctgctgtacttgtattcatcattcattcccctttcttgtgttagcactctcctctttgtcgataatatccgctgccgccttcagaaaacgccatgtattatgagtaatccaattaggattctctaaaaaatcatccaccatcatgcgcatcacctgagataagtttagccctttaaccttcgccaacgtctcccagtgttccttttgttttggcgtcacacgtatcacaagttgctccgacttacgttctgacttctttttacaatttggcataatatgatacctcctgattttattattaactaataataattagtattaactgattgttatatgacttttaaaatttatactaccaattaatttaatcacgattagcctcaaataaaagacatgtactattatcaagtacgtattattttatcgaatttgacaccaaatcagctcttctgaatgttaataccatggatttcattatccaaaatgtataacattttcagtgttagttgacacgtaaaatcgttaatagataattaaaaacttataacatattaataaaaaactcaggaggttttcatggaaatacaagaagaatattattcgattaatgagatttgcagaaattttaaaatcagccaatctaccgtatataagatgattaaggataaaaaaattcatgccattaaattaggccggtgttggaaaattcccaaaaaagaatttctccaaatgttatatgagcacttctaattacatttttctaaatacgtttcagcagtaatcccttatctgtctgaacgaattaaaactactaatgctataaaactactagctaacttttcatatatctgcctggaaataaaaagctatcccagagataccagctgatgcttcaacctctcagacacgataacatggatattgactcataaataaaattatcaccttttcatgtcaattggagtcaaattggagtcaaaagggcgtcctgccctcgcagaacgccctcgtatacgtacatatttacttaaaaatacttcttgcttccccaaagattactcttcttcaaatccagatactcattataagccttttccagtatctgcttctcattggaaaacttcagcagatggtatgcctcgtagaacttataatacccggaatccagaaagtactcttcccgctgtggtttgctgtaatagctgtcggccatcatcagataccagtgtacgtccttttccaccacatcctggggtgtgttaaaggagtattggctcttgccgatatacttgataatggatgcactgacaccggtctcctccttcacttcacggagggccgtttctttatactcttcgccagcttctactgttcccttaggcaaaacccatccctcatacttgttcttgtaattcttataaaggacgaggattttccctcgaaatataaccacaccgccgcagctcgttgcttcaatcattgcaattcctcctggtgttggtgtgaacctgatctgcgtctgtaccggacgagtcctttacagggcccgcgtgcgtcccgctaattaatgtatgcagcactgcatctgttgtcccggttacgcaatcataactggtcttagtatacaacttttggaaaggatatgcaaggcttatctgctatttcagggctggcaggtattgggagacagggttgggcaaacgccggacagccatactgataccggtatcgggccaggctttaatccaggccgttcatccctttaaatactttctccgcggttatgggaagctcccgtattctcacgcccactgcattgtaaaccgcattggcaatggccggggacggggtgttgataaccacctcgccgatggatttagcgccgaatgggccggtgggctcgaagctgctctcaaactccacctgcaccctgcccacatccagacggctgggcaccttgtactgcataaaggaattctcatggacctttccgtcctttgagtaacttacatcctcatacagggccatgccgataccctggaccagaccgccctctgtctgaacccttgccaggttttcattgagaggtgttccgcagtccacagcggcagcaaatttgattaattccacctggcctgtctccagatctacctccacctcggcggctcctgccataaagggcggcggggatatgggcgaggaatgggactgggtcacctgaagggcgtcctcattggcgcactggaccctgttcgccaggtcctttatggtgatttccttcctggtgccgtccgcctcgcaggccagcttatatacccgctttccgtcaaactccagctcctccgctccggtttccaggtatttggctgccttgtggagaattttttccttcagggcttcacatgtctttaccactgctgttccggtcagataggcagtgctggaagcataggagccggaatcatagggtgaaatgtccgtatcagccccaaataccacgatatcgtccagctcgcatcccagacactcggcagccacctgtgccagcgtggtgtcgcagcctgttcccatgtcggcggcaccgattatcaggttgtaaaagccgtcgtcgtttatcttaatggtagcgcctgccacatccaccccggatatggaggaaccctgcatggccatggcaagtcccacaccgcgcacctttgaaccgcttacctggcgtctggggtattttccgtcccatcctatcatgtccttaaccctggccacacagcggtccagagcgcagctgtccgctgtctcaccgtaataggccggcatcacgtctccttctttgaccatattaagttccctgaatttcaccgggtccatgcccagctctgccgccagctcgctgaccgctgattccacggcaaagattccctgggttgccccgtatccgcggtacgccccggccgacatccggttggtgtagaccacgtcataactgaaccggaacgcctcaggcgtgtggtacagcggaatggatttatggccggacaggcccactgtggtgggtccatgttccccgtatgcccctgtatttgacaatgtatatacatccatggctttcagtataccgttgtcatcgcatcccagcttcacccgtacctccatctcatggcggggtgaggacgcaatctgagactcataacggctgtaaatgattttggctggctttcctgttttccaggtcacgatggcagggtacacctctgccacaaccgtctgttttgccccgaatccccctccgattctgggcttgatgacgcgaatcctggatttgggtatatccagggcatgggccaggattcttctggtatggaacggaatctgagtggatgccaccacatttaaccttccatacacatccagatgggtgtaggcccggaaggtttccatcatggcctgctggttggccttggtgtggtacacccgctctatcacatgggtacagcctgcaaatgcctgttccagatccccatgaccctcaatgcctgaggcgcagagattgcgtctgttgtcagctcccacatcgcagagactcttccagtcctcctccgggtgcaccagtatctttgcgtccttggcatcgtgcatgtccagcacaggctccaggacttcatattttacacgtatgagacgcatggcatggtccaccacagcctcatccctgcctgccacgattgccaccgcgtctccggcaaaccgcagcctgcggtccagtatgagccggtcatagggactgggctccggataggtctgccccgccatggtaaaacggctctggggcacatccttccatgtgagaatgcactcaatacccggtatcttggcggcaacgccgcagtctatctccttaaccatggcatgggcgtaagggcttctgagcacctttaccaccaggcagtcctttaatgccaggtcgtccgtaaacaccggcttgcctgtcaccagggccctggcatccttcttgatgaagggagcgcctaccacacggtaatttcttccggcatatgcaccgcctgcgctgccgcatgtgccgcatgtgctgccgcatgtaccgcatatgctgccgcatgtaccatccgtaccggcgcatgtgccgcatgtactgtcagacgtcttattatctgtatatcccatccgctcacacctcctgtttcgattccagatatttcttaactgcccgcagctgggacatatatccgctgcagcggcacaggttgccggccagatactccttgatggcctcctcatccgggtttttaagctcccgctccatggccagcacattcatgatgaaaccggggctgcagaatccgcactgctccccgccttccgctgccagaaacatgccgaattcctctgcttccttctgaagtccttccagagtggtgacatggcgcccgtctgccctgacagccagaacggaacatgacagcacaggctttccgtccagccatacggtgcacaggccgcagttggctgtctcgcagccgcgtttcacgctgtagcagcccaggcttctcactaaatccagaagaaggtcatccggctcagcctctgcctgcacattttttccatttaaccgaaactctatattcatcctttgcttacgctccttcctgtcagtctctccataaggcgtcttgtatacacagcagccagctggcggcggtactgtccgcttgccctcgtattgctgccataggtaaaggaatcagccgcctccccggcaagctgcgccagactgtcatacccgtcgtccctgattttcacgacctgggcccgtcccggcctggctcccaccgccacataccagtcattgccccaccgggatacacagcaggctatgaccgggaaatccgtttccgaattcctctgggtggtataggctgcttttcttccgtctttttttataatgatgcgcaccagaatatccctgtcatcccggcgcacaggccgtttggcaaattcctccagaggcactatgcctccgtgataaagctccacatatgtatccagggccatcaggcaggtcaggatgtcggaaaatccaaagcggctgtaaatgctgcctcccactgtagccaggttgcgcatctgaacgcccacgatatggcgtgtacattccttaaaaacgcctccgaaatactggtcaagcccctggtctgtctccaactggcgcagggtgcacatggcgccaatcctgaattcttccttggtttcctcgattttatcaagtcccaggccggacaggtccacgatggtacgtttggtcacactggtcatcttaagccacaccatgcctcccacaaccaggctgctgcgcttctggcatagttcatacgcctcggacagactgtccacttttacataatcctctgctcggaacacgtagattctcctctcttgtcaaatgcgtgaatacacgccctaaaataaagcaaacagggagattatatcatgaaatctccctgttttctacatataccgttattctttaaaataataaatgcatgaacaatgcgctgattggtatggccacaatggtccgctcaaagaagcagacaatcagttccttcagagatacaggtatcttcgttgacatcatgaccacgatggtctcagaaaagaagataatctgcaccatggacacggtgactaccatgtacctggcccccacggccagggtgccgaccttatcggcaatcatcagcacgggtaaaaacatttccgcgattccaaccggaagggaaggcgcaatctcagccgcattgggaacctgtaacaggacaagcaagggttcaaataatttgccaatccagttaaataccggggtataggtggcgatgagcattgctatgattcccacggccgtcagaagtgatattacctttggcagcacataacagctgtctaaaaggctggaccggatttctttcagaagattgggcgcagtggccgctttcttgaccgccctggaggctcctgtcttaagcactgccctggcaggtacacgctccgccaaaatctcttcctttgtctgctgccgtccgtctgcaaacacagacgccttgcgggacagcgggggaattctggccataaagaagctgactataagagtcaccagcagcgctataaaataaataggcagaaaatattccgaaaggtctgctgtctctatcaccttataggcaaatcccacgctgaccgcgctgaatcccgtggcgatgagagccgcttcctttttcgtataaatccccttctgatacagcttgctggtaatcagaacccccacagaggcagaactgacaaaggacgcaatggcattgacagcacttcttccgggaatcttaaacacaggccgcataagcggctccatcaggctaccgataaaatccacgattccgtaattcagtaaaaacggcatgaacacagcactgaccggaataatccaggccacgtccgtggcaatggagtatacggtttctcctatgtcgggactgacgatggcagccggtccctcaaaggagggaaaggtgtagtgcagcatcagaatcagggcgaatatactgcccagcaggtaaaacagcggatgcagcaccgaatcctcctgataatacctgtaaacagctgaatccttgtttttgcagaaatattttccgtatacgctggccagtccgtttcccatgatgataattcctcccatccagagtcccgcaagtcccaggccggctttgatattcttatatatgatgccgaaggtgacatccgtgcttccccttacagtgaccgggacaaaaaagatgatgactgcaatcagggtgaaaatgactgcctttaccatgccgcttctccactgttccctggtaagcaccagtgcatctaataccgagttgtcatttaggttcccgttcacattattgtcattttccatgccttatcctccattgcagctgccgctattttgcctttttcttcactgccaggatggacagatattcaaatacaatgttggctgccagataagcggttatctcaccgtggtcatatgcgggcaatacctccaccaggtcaaatcccacaaaattcaggtcctttatttttcttaccagatccagggcttccagggaagtaaagcctcccacctccggggtgcctgttccgggcgcataagcgggatctacgaaatcaatgtcaaaggtcaggaagcagggcttatcccccacgcgctccaaaatcgtcttaatcaggttctctaagcccatctcccttaccttgtgggccggaatcagcttcattcccagctctgccgccatcttatgctcatccgggtcatacagggagccgcgcattcccacctgaatggaatgggacgcatctatcagattttcttccaaagccctgcggaacggcgtgccatggttatatttctggccaaatacctcatcacataaatcggaatgggaatcaaagtgcaccagggcaaccggaccgtactttttcgcaaccgcgcgaagctctgccaatgtgatggaatggtcgccgcccagtacgatgggacatgcattttccttaaggatattggcaaccccttcttcaattgcctgataggtgggatgtatgtagccaggagtcacattgaaatcgcctatgtccccgccctttaacccgtccataatgtttacctgcatgattacattgttaggcttcatcatggctgagatattcctgattgcattagggccaaagcgtgagccggaacggaaggagctggcggtgtcaaagggagcccctgcaatagcgaaatccagaccttctgccgagtccaccttctgcattctcataaatgttcccatattacaaaatcttggtgatgataaggcacttgccggttgtttaatatctgtcattatataaccctccatattatttaactgtattcaatttgattcgtgcgcacttttagttttattggacttattgtcggcaattttccgttaacaacagcataccatctggaaggccttctgtgttatattaatacttgatatgttatatggaaaatcatataattaggtagggactatataaaagctgcatatatgacagaggggttatctatggatatcaaatattttgaatatgtaattgaaatcgtggaatgcggttccatcaacaaggcggcccagaacctgcagatgctgcagccgaaccttagcgtatgcatcaagaatctggagcaggaactgggatttcccatcttccgccggcagcacagcggtatacgcctcaccaatgaaggtgaactgtttcttaaatccgccaggaagattgccacggaactggaaaccatccacaacattccgtccatgttcagccacaaggacaacctttccatttcctgcacctattcatttgacttcatgaaccattttcttaaattcaagaagaaaaaaccgcccacagcctgcgaggactcatttaaggaaaccggcctgatccagaccatccgcgatgtggtggaacagcggtaccggatgtccctgttttactgctttgacacggtcagcgatacctattacgcccttgccaaaaagcataatctgaagctgattcccattgcccgcaaccgtcccctgatccttctggcatcaaaaaagaaccccctttcacgtaagaaggagattccttttgacagtataaccgattataagttcatcatgtatgaaaattttaagtttgacgaatggctgaaaattctgaactttaaaaatgacaataatatcttatatgtgttcgaccggggcggcctcatcgacgccatccgccagagccggtatgtcaccgtgatgatgaaacgctttaccgatacatacagcgaggactgcgtggagatttccattgtggacgctccctttggcatggacgcctactgcctgtatcacgcctcctacaccatgaattccagggagaagcagtttatccgggaattaaaggagctgtttgcggatcatcctgctgagcggcccatatagatattcaacggctcatatagatatcaaagagctgtctggctatgggggcggccgccttccccccgctgccgccttcctccaccagaaccgtcaccaccagccgcggggactcagccggcgcaaagccggtgaaccaggcgtgggtttcctttcctgtctcaaactccgcagaccctgtcttggctgccaccgtataagcatccgtgcgcacagccgaccctgttccctctgtgacaaccgccctcataagctccgtaagtcctgccgcctcctttgcgctcataaggcttccgtacgcggcgggcatgaactttttgatggtttcatcccctgcgctgacaacagagtccagaaaatagggcttcatcagggtgccgccgttggctatggcagccgtaatcatggcattgtgaaggggcgtaatctgggtcgtcccctgtccgatggaggtctgcagaatttcccaggttccggctccgggtttcatgttataggcgctctccttatagggaatcccgctcaggggaagcggtccgttaaaaagaaggtccccggcggtgctgttccactttcccaggtccattgtaaggcccaggctggcaaatgcgccgttgcaggaattggcaaaggccagggtgaaatcctgatgtccgtgagccgtactgtgatagcacttaatccggtattccccgttctcatacacaccgccgcagtcaaactggtaattcttataatccgcgggatgttcccgcatatattccagcgcagtcactatcttaaaagtggatccgggggggtaaagcccctgggtggccctgtttaaaagctggccctccttattatcctgggcggtcagggcttcccagtcccccagcaggctgttggggtcgtaaccgggcttggataccatggcaagtatcttgccggtatccggctccatggcaatgaccacgcccttcctggctcccagcgcggcataggcagcctgctggagttccgtatccagggtggtgtatacatcgtcccccggattcttattgccggtcagttcatttcccacctgctccatcagattcacatgggaggtcagcagatagaaattggccagggcctcgattcctgtcttgcctttggtggaatagcccaccgcatggtcaaagatatccccgaagggatacacccttgtctcgtttcccccgccgtccatctgggtctgggccagcactgtgccgtccgatgccagaatcctgcccctcacgatacggtccgaaaagctgtccagtcttgcgttgtaggagttgttgattacatcctcgctctttacctggaggaaatatcccagataggctgccagccccaggaacagggccaccaccacataggtgatgcccagaatgctgcggttggattttgagttgggctttggcccggcatccgccttcttcatcacggcatcacctcctctccggtttcttcctcatcgttgcgtttcagaatgtaaagcccctggataatgccaaacagcaggaaggttcccaggatggagcttcctccgtagctgacaaagggcagcgtcactcctgtggacggtatgaatttggtcaccccgccaaccgtcaggaatacctgcacaatatactccacccccaggccaaatgcaatcagcttgtagaacacggcctgcattctggctgcaatcatcataaactggataaaacagcccaggcagataagaagtacgcagatagcaaaaatggctcccatctcctccgacaccgctgaaaagataaaatccttctccaccaccggtatctttcccggcattccctggcagagtcccatgccaaaccatccccctgtgccgatggcaaaaagggactgggtaatctggtatcccttgttctctatatcggcccacggattgctccaggccgccaccctgcggcgcacatggtcaaacagctggtaggctgccagggcggctcctgttcccagggcgcttcccgttatcagatacacccagcttcctgtggcaacaaacagcatcagcaggtaagtgacaaagaaaatcagggcgcttcccagatcctttgacagcaccagaaccagaacatgagcgccggccacggccgttgtcaggaaaatggttttgaaatccgtggactgatagaacatggacgccacaaaaaacacaaaggtcagcttcacaaattccgacggctggatggatactcctgctatggtaagggacaactgggcgccgaagctctcgtttccggcagcccataccaccagaagaatcaggagccctgcccccgcatatacccactgaagcttataaagctgccatacccgctccatgatatagggcaccagccaggccagggccgcggatatgaccacaatggcaaactggcgcagggccttgtccaggccctttgccatggacagccgggtaagcatgataaagcccacgcataacagcatacaggcgttgtttaccagcagtctggacacattccggtacaacaggcggtacaggtaaatataacacaggaaaaagaccacctgcgccccgtaaaatgccagaagcatggcctgcattccctcgtcctctgtcttcaggaacatgaccaggtatgccagaaaatgtatggcgaacatggcccggttctgtctggcacataccctgcgcttgcgttccatatccgggaaggaaaagaagcggaaattcgcataggtatagactgccatcagcagtatcatcaggtatttggatatttctacaatcagattggtcataagcctcactccactccgcgcttaaagtgtcccctggtaaagtctctgaagggggcttccacatccctgccatatacaaaggaaccgatgaatgcatccagtaccttttctgtctgctctgttccctctaccgtaaactgaaggcggaggcgatccggcatgagccggcccaccagcttttcgctgcccagcagggacaggggcgccggattgtaaatggtattatagcagaaggaacagtgattctttaccggaagtaaggcccctgtcctgtccttcatcataagtgttccccgtttatgggtacatcctttcaccgtattggtaatgcactgggccgataccatcatgggcgcgtttccatagataataagctcgctggccatccccaggccgcggcaggccccaagaacaggctctatctcacggctgttcagctcccagggcatggtgagcagggatgtccccatagaggccagcacctctgcggaccggctgttccagccatataccgaggcgtccatgccaaagggaagggacgtcttttgattttcctgttccataagatccttcagccatacggcctcctccagcgctctgatcaacacgccgtcaaagcctgcctggcacagcaggcggcggttcgctcccaggtacctctgggcatgggaacggaatatctgcggaagggccagccagcactgttttcccctgtcgtggcagcggtctgcaatatccctccactggtccggattaaaaccgtccgcatccagatagaccaccgatatctcaccgcgggccagcacaggagaaagctgggctgtttcttccaggaaggcggtgaggacagactgggattgcggcgccgcggttttggtgggaacaggccggaattgtgctcctatgcccccttcacctgtcagcaccctggcgccggtgagctttttctccagctcctgaaagccggtgcggcgcagctcattgagggcctggaccggaaggaataaatctccttctatttgggctgtaagtgtctcgaagctaaaggggctcccgcccgtcttattcagctgttttaataccttctcccgggtcatgggctgatgttcggccgcctggggcgcctggcccagaacctgaaccttttccccgcggctctccagcgtcaggcggctgggttctccctctgccagctccacatgcccccgcaccttctccttcagttcggccaccacataggtcttatccagatattcaaagagtttctggtttccctccctgaactccggtttttccttcagcgcaaccatgccccgtccattgtgccgggcatagtagccgtctgtgaacccgcctctgtcaaagagatccaggagcattttcctgtcctcgggctccacgaaatatccctccctcccctgctccaaataccggtccacgtacttgcggtaaatgctcaccacacccgccgtatatctggggcttttcatcctgccctctatctttagggagtacacgcctgcctctatgatatccggcaggatgtccagggtgcataaatccttcaggctcagcacgtatctctcgctgcttttattgagaggggatgggcctgtccggccggaggcggccggcttttggttccggttcttttttccggtctgttctatgattcgggacctggctcctgactggccggcctgctcaggcgcgcaatgtttgtctttctgccggcttaaatctccaggctcatacactgtatagggaagacggcagggctgggcgcagcgtcccctgtttccgcttctgccgccgataaggctgctcataaggcattgccctgaatagcagtagcaaagggctccgtgtacaaagctctctatctctatgtctgtctcatcatggatccgccgtatttcctccagcgacatttccctggcggtgactacccggctgcatcccatttccttcatcatcctggccccgtatacgctggtcactgtcatctgggtgctggaatgaagctccagccccggaaaatgccggcgcatgaaagccagggctcccagatcctggacgatgacaccgtccaatcctctgtcgcagtagggacgcatgtagttttccagctcctccagctcatcttccttgaacagggtattgactgtcatatacagacggcgtccgtgcagatgcacatagtcgatggcctccaaaagccccttttcatccgggttatccgcgtaggccctggctccgaaccggctgccccccatatagaccgcgtcagctcctgctgccactgctgccttcatactgtcaaatgaccctgccggtgccagtatctctacctgtctcttctccattttgtccaacctttcctgaactgtttccctgaaataaaagatgcctcacgtatccccatgagacatccccctcgtaatcttcttatcttcttccacctttgtgggaaccggcttttctggctgcctgcagtgcttttctggcaagctcctcatccgtcattccccctgcgggcgccgccgcaatgggttccgcaacaggcgcagcaggcggtgccgcggttgccgctgcctgagcggaagctgccgtcattcccctgcctgcttctgacgccgggtttaacacccgcagtgacggagccggctgcttctgtgcagtctggactgccagcgtgtccggctgctgcgcggatgcgtctgcttccggtgtctgcggcacggcctccggctgggatgattcccgggcaccggaaccggaaacatattccgtccgggaggcattcagtgtgatgcccgcctccacttccacggtttcttttatctcctccactgcctgcactacggcattattttccgtatcagcggatgggttatttctgagattctgaaggttttccctggcctcctttaattcgccttccagctgggcggtccggcggttcaaacgatccagttccctctggcgctcctccaagtccttaagcactgcctccagcttcatctgtgtgctgaccagctcatgctttaagctgtaggtctccttctccatatcgttcttctgacgctccattccctcgccccattccacggctttgaaataatcgtctgctatatttaactccgtcatgaccatctggtaatccgcgctctgtttagtgaatcccggtaccttcctcatggcgctgtttttctcgtttacgtagctggcagctttctggagatagctctcatcctcgctgccgcccagtgtgtatacttttccgtctattaaaacttgggtgtaattttttgtatccattctgctcccctgctttcctgctttgctggtttgtggcctgatgatttgtgtggctggtttccgcgggcctgctgatgcgccggctggtacgcggtgcgtctgccggtttcttagtgcgcggctgattccagagggcgtctgcctggtccgctgatgcgtctgcctggtccgctgtgcgcgttcgattccgctgcgccccatctcactcacgggcttcgccctatgaaaaaagacatgggcagatttccttatgtgccggcacaacggcaatctgcccatgccttttttcgcactgctcattgcctacgtggacattataccacacccccagccttcttaacaaggcggtttctgcatttctagccccaggtggcggtaggctgtctcggtggccatgcggccccttggggtgcggttgattagaccgttcataaggaggtatggttcgtatacctcctccagggttcctgagtcttctcccagtgcagctgccagagtatctaatcccacggggccgccggagaacttttctataatcatcagcaggatattcctgtcgttctggtccagtcccagcttgtctacatccatgatgtccagggcaaaatcagttacctcccgggtaataacgccgtcatatttgacctgggcaaaatccctgacccgctttaacagccggttggccagccttggggttcccctggaacgtctggccagctccatggctccccctgcttcgatttcaacgcccaggaccctggcggagtggaggataatgattttcagttcctccggcgtatagaattccagccgctggatcacaccaaaccggtcccttaggggcgcggtgagaagtcctgccctggtggtggctcccaccaatgtgaaatggggcaggtccagacgtatggacctggcagtggaatcctttcccagcatgatgtcaatggcaaaatcctccatggccgggtacagcacctcctccacctgacggttcagacggtgtatctcgtccacaaaaagcacatcaccctcctggaggttattcaaaatggccgccatctccccgggcttttcaatggccgggccgctggtgaccttcatattggttcccatctcattggcaatgatgccggccagcgtggttttgcccagacccggcgggccgtaaaacagtacatggtccaggggctcccccctggtcttggctgcttctatatagatgttcagggtggatttaatcttctcctgccccacataatccctgagacattggggtcggagcgtggtctctatgcgctcgtcttccgccgtcacttctgttgttataatcctgcgttccatttacacctctgcatatcccaatttgacgtttgccagaatccctacaggaaggacaaatgcttcagggacgccttcagcacatcctccgaagtcattccgtccgtaacctccacctgcttcactgccctggatgcctctgtgttggtgtagccaagagctaccagtgcctggaccgcctccttggccgcttccaccaggcctgccacggatgcgcctgtatccgcggcacccatgccggccccgccggccatgttccccagcacgtcgtccatggatatcttgtccttcaaatccagaatcaggcgctgcgccgtcttgttgccaatgcccggcgcttttgccagggccttcacatcctcgctgacaatggcaaggcgcaggtcgtcgggacggagcacggagagaattcccaatgctccctttggtccgatgccgtttactcccagcagctgcctgaacatgtccctgtcctggctgtgcaggaagccatagagcgtcatggcatcctcccttacctgaaaatatgtataaaccgtcacctctttccccattcccggaagctccgggagcagggagacaggtacgtggatggccaggcccacatggcctgcctccaccacgataacgtcttcctcaatggccatgagaggcccttttacgtaagaaatcatgtattcttcctgttctttctctctctaatgtcctgcccttcatcatatcatacccatgaattcaatgcaagtctgccgaacaaatattctgttttggaccaaactccgggcatcagacacttgcgttcccggattttttagtatacactaacccataggggatatccggaactgaccgcagctcatatccggttccctctaaaaaggagtgactacacatgataaccattaaacatcctgttgatttacctgacacatatcctctggaccgcatcggcccccttaaggacctgctttttttcgatatagaaaccactggcttttccggcgacacatcccagctgtatctgatcggctgcacataccacgacggctttggctggaagctcatacagtggtttgccgactcgcgcgaatccgaaagggagcttctgacagccttcttcaccttcatggagcgctttaagatactggtacattttaacggagacggctttgatatcccctatctcctaaaatgctgccgccggctggatctgccctataattttgaccgcataaaaagcgtggatatctacaaaaaaataaagccctaccgcaagctgctgggccttgagaacatgaagcagaaatccatagaacagttcctgggccttgcccgggaagacaaatacaatggagggcagctcatagaggtttaccgtgaatacctgatgacccatgaatccttcctgtacgacctgctgattctccacaatgaggacgacttaaagggcatgccctccatactgcccatcctgagctatgcggatatgatggaagccccttttttactggaatcccagcagcttttcacctatgacgacatggcaggaaatgcctgccccttcctcagccttacctggaaaagccgctgcgccatcccggtgcccctggcatacgacagcgccccggtgagcctggagctgaaccgggacactcttatatgcaatattgccctctaccagggagagctcaagtacttttattccaactataaggactattactacctgcccctggaagacacggccattcataaaagcgtaggcgaatacgtggacagggatgtgcgcacaaaagccacggccaggacctgctacacaaaaaagcaggggctcttcctcccccagttcggcgctctctggtccccggctctcatgcaggaatataaagcatccctcacctacgcggaatatgtaccggaaatgctgaccccggacggcatggctgacgcctatgccaggcagattctctcctatgtgagccaggcaaaggaactttaatatcctgcaccacacaaaaaagccctgtcaaaaagacaggactcatttaaacatcattaccgtattttcctattttctgggcaaagccgcccggtaggtttctcccaccgtattgccggaataggcagcgtacatatgggtggtggtggaatcggaatggcccagcatggcctggaccgcatggatatcggcgccgccccgaatcagatgggccgcaaaggaatggcgcagggtatgaggcgttatatcggcctggataccggccttttccccgtagtacttgataatcttccagaagccctggcggctcatggccttgccgctgcaattggtgaacagccactgggattccttacccttaagcagctgtgagcgtcccttttccagatacacgctcaaagcctgcttggccggcttcccaaaaggaaccatgcgctccttctgtccatccctgcaggtgatatagcccacctgcatgttaagatccgaaagctccagcccgattagctctgacacacgtattcccgtggcgtacaacagctccagcattgccttgtcccgtatttccttggatgttgtcatgcccggctggtccagcagagcgttgacctcattcacgctcagtatcacaggggcctttttctcaatcttgggcgctttcaggagctccgccgggtccttgcggattcgtccttctttgaacatgaaattgaaaaaagccttcatggatgccagctccctggatatggtggtcgtggccttcccctctttttccaaaaaaaggatatatgaattcagactggtcttagtcaccttttcaacttctgttattcctttatcctccagaaaagacttaagctgcatcaaatctctctggtaggaaatttccgtgttcctggaggtctttttcacatccctcaggtagctcacaaagctttttatatcggacgtcatatcgctattttcccctaacccgtttctcacaaaaagtagcccaaaatcgtatgctgactatcattatatctgcatttttccataaaatcaaacacatttttcccactttaggccccattttcaggtgattaacataaaacatacaacatgttggaagggggtatttttgcatgtcaatatgttgtaaagcaatggtaaaatatttttctcacataacccctgaaaaacatcagaatcccttttctttcagtgtttttaccagctccacataaaactccgtcacatcaaatcccttgtaatcctcacgctttaaatcaatcatatcaccgtgggatatacctctgtgcttacggttggcaatggtacctttaaactcgccccacatggcggactccggtgtcaccagcccgtcatttttcccatccacagcccggatgatcaggtagggaaaccataaaaggggatcgctgaggaaatccctcataaccgatgcgtaactctggtaataaacccccggcgcatccgccacctcttcgttgaaacagatgctggctcttgtgctgaactggtgggtggccgtgtagaagtccgggtgtgagtcaccgaacctgctgaaccacaaatcaaatacacctgcaatggcgcggtacaggccttcgggcagcctgcacgcgtagtccacgaaccggcagccccggtgaggcgtattgatggtggtcagggacgctaccataggtgccgctcccagcctggatatggcatagcgggaatccaggccgcccttggagtgggcaatgatattcaccttttcacatcccgtctccctgcatatctcctgtatctttctgtaaatatcgcctgcattgtacgcaaccgttgcaaatgcctcctggttgccgtagtagatatccgccccataccgggccagctcccttggaatcctgccccaatagttaaaataccgcaggtccctgaaccccaccccgtgaaccagaagcagcggatacctggtgctgcatatctgcgactgggcgcgtacctggcgcacggattccttgtagcaggcaaaatcatattccccgtgtacaattctcatggcatagagcagaacccccaggttaagccccggaatccacatggctaagagcatcaggatgcggtatttgagccgcagccggacagaggtgaaaaatatgcgcaggattccgttccacaacaggatgaacagcatgattgcgctgtagatgccgtttatccacagaaccctctggtcatgtacggcccggtacgccttggggtacagccataaaaggacggctgcctgggcagcgaacccatacagggcgctgtagcacagactccggccgccttccatgatggtcacccgccatgaggcaaagaaatctttttttctgggcatgatattgtaagccatccagaccagccaggtacaggccagccccacagccagaagccctgtccgcacagccgggctaacggctccctccggcggcaaaatccctcctgcccatacataggctgccaggggtatattcactgcatatggtatgtacaaagccaggaacagccgctttaagcagattcgtcccgtttttttcttcttcacgtacatctctccttttggattcctataataacagcagaagcgtacctgcggtcagaagaaccagacctgcaaaggatttgcggtccagcctctcccccaggaatattcgggaaaacagtatggtcaccagaatgctgagcttgtcaatgggtacaacgacactggcaggcccctcctgcagggccctgtaataacacagccaggagacccctgtggcaaatcccgaaataacgaggaaacaccagctctttggcgcgattctacccagatgcttctgctttccctgaaggaataccaggagccaggccattgccagcaccacgcaggtacggatggctgttcccaggttggattccactccctgtattccaatttttcccaaaattgctgtaaggctggcaaatgcagccgataaaagggcagccccaagccatcttctgcttcctgtcttttccactccttgcttccgcttctgaatcatcatcagggtgcctgtcccaatcagggccatgcacaggattttcatacccccaagtccttcccccagtatcagggcggccagaaacatggtcagtatagtactggatttatcaatgggggccaccttgttcacatcccccagctgaagggccctgaaataaaacagccaggaagcccctgtggccacgccggacagtaccagaaacagacaggttttggcgcctatggttcctatggaaccagctgaaccggtaaggaacaccataatccacgaaaacacaagaaccactgcggtacggaccgcggtggccaaatccgagtccgtatccctgacgccgattttcgataagacggcagtcaggccggcgaacacagctgaaccgaacgcatacaacagccattccatatttgcttccccttttatcctttgtatcctctgctcccctatggaaaaagcccccacaggaagggtgaaacgaaaacctccaggaacgcccctgcgccggtgataattaacagcagaagtcccggcaggatatggagctttttctgaatctggcctgaccagcctgacagcacgtaccacaccaggagatagaccagaccatggggcaggaccgtacataaaaatgcagcgattcccaacagtcccttgcggatggtcagcacagacagaaccactgccaggctcatccctgcgtaaaaggtcaggaacccaaacagcatctggctgcacacagtaactccggccagccacccgccgcaggtctccagggccctctgcctgaatacagttatatattcctttactcccctgtttccgcttccgaaggagcccgctgctcccaggatacacccctgcaccgtgggaccgccaaatgccagcgcggctgccgtaccgcaaaaaatccctgccgtaaaacagaacagcagccagtcctcgtaggtgagcgtccccagacgcagccttaaccacctcattcccatgcattatcctcctgtcccagtttacaggtaagaaacatatcagctgcagcttctcccccactactgtatgacagaaatacatggtttatgacttagcccttgaccatggtgtccttcttatcctcagaacggtattttctggcataggccataatggcggcaatggtcttgccgtccgtaatctttcctgtgtatatcatgtcctccagctctcccaggctgcatggaaccacattgatcacctcatcctcgtccagattctgatgggagggaatcaggttgtgggccacgaatatgtcaatggcctcatcgcagaaggcaacggttgtggtaaggctcataaggtactccaggttctccggtgattccaccctgtatcctgtctcctcctccagctcccggaacgcgcactccaccttgggctcccccggcgcatccagcttgcctgccggaatctccatggtgtagcggtccagggcattgcggtactggcgcaccataaggatttttccatcgtcggcaacaggcaggacagccgccgcaccatcgtgatggatgaaatcccacctggcctcatggccgttagccaggaccttgtcctcgtatatcttaagaatgtttccctcatatttaagctggcggtccagccgtatcaccggtatctgcgtattcttttccttatcttccatgtctgttccttcctctctgttttggtttgatattattgtcctacttcatgctctgggtcttctcatagcaggcgtccgccgccttgatgagcgcatttctcagtccgtgctcctccagggctgatacgcccgcaatggtggtgccgcccggggaacacacctcgtcctttaactggcccggatgctttcctgtctccagaatcatttttgcgctgcccaggacagtctgggctgccatggcataggcagtctttctgggaaggccgtatttgacccctccgtcagccagggcctcaataaacatgtacacaaaagcaggcgaactgccgctgacacagccaactgcgtccataagccgttcttccaccatctccacccgtccgcaggaggaaaatatgtcccgtacggtttccttttcctcctctgtgcaggagccttccctgcaggaaatgccggtcatgccttctcccagcatggcaggcgtgttgggcatggctcttaccacccgcacattcccgcccaggcgctctgtgatattggaaatcgtgacgccgggagccagggatatcaccacctgctccggcgttaccacatcccttatctccgaaaacaccgcgtcaaaatactggggctttaccgccagtatcagatacttcaccgcctttgcgcattccctgttggaaccggcatggggcacctttgtcctggctgtcactgcctccatcttatcctgatgggccgctgaaaatatcatatcctccggtctgtgcgtcttgagaagcccgtttaaaatggcatttcccatgtttcccattcctataaaaccaatctttaccatcctcatacctccttgtcatgaacattcaaaccgcagcaaagccccggcagactgccttctgcagtgcgccagggctcccgggcatacatgatgcctcttcattcatcagtcgatattcctcagtatatcacaaaaatcaaaggtagcaaagtaatcctcaggagtttctgccctgcgtatcatctccacagtaccgtcctcctttaacagaagctctgctgacttcagctttccgttataattatatcccatggcgaatccgtgggcgcccgcatcgtggataaacagaagatctccctttttaatttccggaagcatgcggtcaatggcaaacttatcgttgttctcgcacagggaacctaccacatcgtacatgcgggtacatggctcatcctcccggcccatgaccgtgatgtgatggtaagcgccgtacatggccggccgcatcaggttcacggcgcaggcgtccacgcccacatactccttataagtgtgcttctcatggatggcctttgtcaccagggcgccgtaaggccccatcatgaaacgtcccagctccgtgcacagagccacatcatccataccggcgggaaccagaatctcttcatagacccttcttacgccgtcaccaattgccaggatgtcattgggctcctggtccggacggtaggggattccgatgccgccggacagattgatgaacgcgatatggacgcctgtctcctctttcagtttaacagccagctcaaacagaatctttgccagcatgggatagtattcattggtcaccgtattgctggccaggaacgcatgtatgccgaaatgctttgcgcccttttccttcagaatcttaaatgcctggccaatctgctctgcggtcatgccgtatttggaatcgccgggattgtccatgatgtcattgctgattttaaacagaccgcccgggttaaaacggcagctgatggtctccggaatatgtcccagggtttcctccagacactggatatgagtgatatcgtccaggttgatgatggctcccagcttttccgcataggcaaattcctcaggaggcgtatcgttggaggaaaacatgatgtcagaaccggaaaaaccgcatgccctggacatcataagctctgtcatggatgagcagtccgtgccgcatcccatgtctttcagtatatttaacaggaaaggattgggcgtggccttgaccgcaaaatattccttatatcccctgttccaggaaaacgcctgcttaagcctggcggcattctccctgattcccttttcatcgtaaagataaaagggcgtagggtatgtcctctcaatctcccttaattgttccagtgttacaaatggcttcttatccattatctatgtgtctcctttccctttttgcgcaaaaagcctgtcaggaagtacaatatgttcaattgtactcccgggcagacttccttgtccagtgttttttagttatgctctactcgatattaataactctcataatattggtctgggtggctgcctcatggcgtcttgcgtaggttacgactccggctgtgatgacggccagctcgccttcctccacaagacctctgttcttaagctcctccaccgagttctcaatcagttcgtccgtggactctgcgcggcgggaccataccggtaccacgccccactgaagctgcatctggcggaccgtagccatgctgggggacatgccgatgattctggcgccaggtctccatttagagagcatctgggtggtaaagcctgtaatactgggagcgatgatgacatccgcatccaggtcatgggcggttgatacagaggcaaaacacactgcattggaaacattcttcatgttctgctccgtcaccttcctctggcggtaccctgcatagtccagatgcatctctgtctccagtgcaatggaaaccatcatcttaagggcgtccacaggatacttgcccatggctgtctcaccggaaagcatcaccgcgtccgtgccgtcatacactgcattggcaacgtccgtcacctcggccctggtcggccttgggttgcggatcatggaatccagcatctgggtggctgtgataacaattttacaagcctcgttgcacttacgtataattttcttctggatgtggggaaccttctctgccggtatctccacgcccatgtcgcctctggctaccatgatgccgtccgctgcctcgatgatggcgtccagattctcaatgccctccgcgttctcaatctttgcaataaccttcatactggaaccctgctcatccagcatggccttgatttccttaatacagtcagctgtacgtacaaaggatgccgcgatgaagtcaaagccctgcctgattccaaaacggatatcctctttgtccttatccgtcagggccggaagcttaatctttacattgggcacattgacgcccttcttctctcccagctctcctccgttgatgacctcacagacaatgtctgtatccttcacctggcgcacttccagctcaatcagtccgtcgtcaatgagaatccggttgcccgcggcaacatcctcattcagtccgctgtaattgatatagccgatggtatcgtcacctaccagctccctggtggtcagggtataggtctggccttccttcaaagtcacctttttgccgtccttaagctgtccggtacggatctccggtcccttggtatccaagagcgctgcgaccggaatatccagctccttgcgcacttcctttaacagctccaggcgtccctgatgctcgttgtagtccccgtgtgaaaagttaaaacgggccacatccataccattcctggcaagctccatcataatgtttttgtcgctggtattggggcccatggtacagataatcttggtttttttcatgtttcttcctccataaaattgtgagagttaattgaaagttaatagtgtaacggcagattcagacgtgaaagacggaatcatgatttgggggaatccgattttttcacgtgctggtgtgtatataaatgatccatgcagtactcatagctgccttcacattttgaacaatagcggaactccatgcccggactttcctcgtcggtcctgccgcagaccgcgcacttgtggtgggtgcggttcacgggccgcatggtctttaccttgaaatcctgcttgcgctttacttcctttgggctgtatttcttaaagtcctttgtcatcaggaagaaaatgatgaagttggcaagggacaggaaaatggcgattcgctggggtaagctgccgtatacgaacccgaacaccaggaaaaaggcatcaaacagcgccagccatttggccttgatggcaagtataaagtaaatataaaagtattcctccgggaacatcaccgcgtaagccaggaatatggacatactcaggtaagaggtgttaaggtgcatatcccatccccagataaagtatacaataaactcggcaagtatgatgccgatggctcccataaaaaagaacacgttaaagcggaacgctccccacaccgcctccagggaccggcccagtgaatagtacatgagcgccgcaaaaataatccagaaggggctcagtgtgggcgggtacagcaaaaatgtcaccagcctccagacctgtccgtgaagaatggcctccgcgtccagactaaggtaccgggtaaagaacatggggtccatgtacatcatgacaaaacccatgacatacataatgataatgtaatacatcaggttgtgaatggcatatctgccaaaccggcgctcaagcttattaaaaaatctcatcctatcatccttttcatttgcctgtgtggctttatttaaaacaggtctttcttattaaatatatacgcaacaaacagtgacagcagaagggtcaggcccagtactatggcaaatccgtagggactgtccgcaaaaggcatgccatgagagtttacgttcatgccgtagaagctggcaatcatggttggtatggacagaacaatggtaacggtagccagaaacttcatgacaatattcaggttgttggagataaccgatgcaaacgcatccatggtgccgctcaggatgccgctgtatatattggccatctcaatggcctgcttgttctccacgattacatcctccagcaggtccgtgtcctccgggtacttctttatcttctcaatgcgcagcagcttttccagcaccacctcgttggaacgaagggaggtggtaaagtataccagcgacttctccagctccaaaagctcaatcagctcctcgttcttctgggactggtggagcttgcgctcaatgacttcactctttttatcaatgattcggaggtattgcaggaactgggtggcatttttatagagaatctgcaggataaacctggttttcatgaaggtgtggaaatccctcacccttccgtccataaaggaagtgagcacaggcgtctcctccaggcagaccgtaatcagcacatccttggtggtgatgatagccagagggatggtgacaaaccagtccttgccgttgcgctcctctatggaaggaatgtccaccagaatcagggtgtattcatcctccacctctatacgggaccgctcttcctcatccagaggcgcccgcaaatggtccggatcaatctgataggtatctgcgatgtcaatgatttctgaggctgtagggtttgttaacgcaatccagcagccaggctgcatctcttccttttcgtgcatagcaccgtcttcggtcttaaaaatccgtatcatgcgaactctcccccattctgaaattatacgttctcattatagtgactgcccccgcttttgtcaaatgaaatagccttccattttatattataccgaatatttttcagggagaatacataaattttacctgaacagtaaaaagggaaccttagaaacatgcacaattttcgccatttcttcacgattttttaacgcctgtccccaattgtatttatacttattttatgttaaactctactatgaatgtccagcgtcttatcgccggaatttgttgcataagtcacagtattccccataaaactgtattatgatacatgtaaaacagctttacggtcccccagtactgccggacatggttttcccccatggagcggcggaacagccgtcaagttacaaaggaggtcagggtaaaaccccgcatatatgaaattacatacaaatacccttacgcttggaatcgacattggttccacaaccgtcaaagttgcactgttaaatcaggcttcccatatagtattctccgattatgaacgccattatgccaatatacaggaaactctggcgggacttttaaaaaaggcccgtgagataaccggacccattcaggtaatccctgttataaccggttccggagggctcaccctctcctcccatctggaggttccctttgtccaggaggtagtggccgtggcctctgcgcttcaggacttcgcgcctcagaccgatgtggccatcgagctgggcggtgaggacgcaaaaatcatttatttcaccggaggcatcgaccagagaatgaacggaatctgtgcgggaggcaccggttcttttattgaccagatggcggccctgctccagacggacgcttccggcctcaatgattatgcagaacattataaggccatataccccattgcggcccgctgcggtgtgtttgcaaaatccgacatacagcccctgattaatgagggcgccaccagggaagacctggctgcctctattttccaggccgtggtcaatcagaccatcagcggtctggcctgcggcaagcccatccggggaaatgtggcgttcttaggcggtcccctccacttcctgcctcagcttcgggaaagcttcatccgcaccctgcgcctgacgccggagcaggttattgcgccgaatcactcccacctgttcgctgctgtgggggcagccatgaatccccaggataaccaggaggctattccactggagaccctgattcagagactgtcctcaggcattaagatggattttgaggtcaagcgcatggatcccctctttaaggaccaggaagactatgaccggttctgtgcccgccatgccagcaaccatgtaaagagcggggacctgtcctcctatgaggggtgctgctacctgggcattgacgctggttccaccaccaccaaggctgccctggtaggcgaggacggcacactgctgtaccgtttctatgacaataacaacggaagccctctggccactgccatccgggctatccgggagataaaggaacagctgcctgaaaccgcccgtatcgcctactcctgttccaccggttacggcgaagccttgttaaaggcagccctgatgctggatgagggagaggtggagaccatatcccactactatgcggctgctttctttgagccggatgtggactgtattctggacatcggcggacaggatatgaagtgcatcaagattaaggacggcacagtggacagcgtacagctcaacgaggcatgctcctccggctgcggttcttttatcgagacctttgccaggagcctgaactacagtgtggaggattttgccagagaagccctgtttgccaaaaatcccacggacctgggcacccgctgcacggtattcatgaattccaatgtaaagcaggcccagaaggaaggagccaccgtggccgacatttccgcgggtctggcttattccgttattaagaacgcattatttaaagtaattaagataacaaatgcttccgacctcggagaacacgtggtggtccagggaggcactttctacaacgatgccgtgctcagaagctttgaaaaaatatcaggatgcccggcagtacgcccggacatcgcaggcatcatgggcgcctttggcgctgccctcattgccagggaacgctatcacatggccagtgaaccggagacctccatgctctcccttgaaaagatcatcggccttaagtacagcacctccatgacccgctgcaagggctgcaacaaccactgtgtgctgaccatcaaccagtttggaagcggacgccgctttatctcaggcaaccgctgcgagaggggtcttggccttgaaaaggccaagaaagagattcccaacctgtttgattacaagtaccaccggatgtttgactacgaatccctgcccatggaccaggcggaccgcggtacggtaggcattcccagggtgctcaacatgtatgaaaacttccccttctgggctgtgttctttaagaagctgcgctaccatgtggtgctgtctccccagtccaccaggcagctctatgagctgggaatcgaatccatccccagcgaatccgagtgttatcctgccaagctggtacacggacatgtgacctggctcatcaagcagggcgtaaagttcatcttctacccctgcatcccctatgagcgcaatgaaagcccggacgcaggcaaccactacaactgccccatggtcacctcctatgcggaaaacattaaaaataacgtggaggcgctggccgaggaaaacgtgcgttttatgaatccctttatggcgtttaccaacgaggagattctcaccgatacccttgtaaaggaattttccaggacattccagattccggctgccgaagtcaggatggctgcccatgccgcctggcaggagctgactgcctcccgcgatgatttgatgaaaaaaggcgaggagactctggcctggctgaaggaacacggaaagaggggtatagtcctggccggcaggccctatcatgtggaccctgagattcaccacggtataccggagctgattacctcttatggatttgccgtcctcaccgaggattccatatcccatctgggcagggtggaacggcctctggtggtgacggaccagtggatgtaccactcccgcctttacgctgctgccagctttgtaaagacccaggataatctggatctgattcagctcaattcctttggctgcgggctggatgcagtgaccacggaccaggttgccgatatcctgacccattccggcaagatttatacggtgttaaagattgacgaggtcaataacctgggagctgccagaatacgtatccgctccctcatcgcagccttaaaggtaagggaccagagacattttgagcgcagggtggtgtccagcgcctatcaccgggtggtgttcaccaaggagatgaagaaggattacacccttctctgcccccagatgtcgcccattcattttgaccttctggagccggctatccgctcctttggatataagattgaggtattgcagaaccacaaccgaaacgcagtggacgtgggactccaatatgtaaataacgacgcctgctacccgtccctcattgtcatcggacaaatcatggacgccctgctgtcaggcaaatatgacctggaccacacggctgtcctcatgagccagaccggcggcggctgccgcgcatccaactacatcggcttcatccgcagggccctggaaaaggcgggaatgccccagataccggtcatctccgtcaacgccaacggcatggagacaaatcccggcttcaccttcaccgtgcctctgctgacaaaagccatgcaggccattgtgtacggggatatcttcatgcgggttctctatgccacccggccctatgaggcagaaccaggcagtgccaatgcccttcacatgaaatggaaggcccgctgcattgcctccctgtccaagaaaaacgcggccatgatagaattcggacgcaatataaaggggattatccgggattttgacgctctcccaaggctggatgtaaagaagccaaaggtgggcattgtaggggaaatcctggtgaaattctcacctctggccaacaaccacattgtggagctgctggaatccgagggtgccgaggcagtgatgccggatttgatggatttcctgctgtattccttctacaacagcaactttaaggccgagcacctgggctccaaaaaatccaccgccagactgtgcaacgcaggcattgccttgttggagtatttccgcaggacagccaggaaggaactgacggccagtatgcattttacgcccccgtcagccatcaacgagctggcccagatggccaaaggcttcgtatccctgggcaaccagaccggcgagggatggttcctgaccggcgaaatgctggagctgattcacagcggcgtaaacaacatcatctgtacccagcccttcggatgcctgcccaaccacatcgtcggcaaaggtgtcatcaaggaactgcgccggaattaccccctgtccaatatcattgccgtggactacgaccctggcgccagcgaagtgaaccagttaaacagaatcaagctcatgctggccacagcccagaagaacctgaaaacagagagttcccgggaggaccgcggaaacggaaggcgccccgtggctgcctacagcccctgcctgggaaccatgtcgcatacataaaacggtgtacggaaactacaagctgtatcccgccatatacggaataatgtatataatcaaactataacaaaacccctccgtccaataaggttatcaactgattgatacttattggcggaggggttttgtttattgctttttaatatatatcctgcgtcttactccggaaacagaggcacaatccgttttgcggtcacctgcaccagccccatatccgacatcttggcatcaggtataaccggaagggcaagggttacaatgcggagcaaaggattttccatattggtaaggcccagggccctgttggcatccttcatcacagcgctgtcctctgccagctcctctgcgggcttaagggacataaggcctgccagcggcaaagccaatgtgtgaagaatctttccctccttcacggcacacataccgccgcctgtgcgcgccagctcctctgccgccataagggcttcctccgggttgtcgtacacaatggtaagattgtggctgtcatgggataccgtggatgccagggcgcctgtctttgtgccaaagcccctgaccagacccagggctatgttgtcattgccctcatagcggttgaccactgccacaaatttcaggtcctggtccccgcttatatctattctgccgtcctttacccaaacctcctcgcacacgatatccgtggtggagagattcatgtcatagtatttcatcagattgacctttacttttccctgggatacaggcggatggatggtaaagtcctccgcggccagcttccttacgtggactgagttggctgactccagaggataggatttgtcctcaatttctgccagcagcctgccctcctgtgccaccagcttacctgcgtagaacacatggctgggcgtcagctccctcaaatcatctaccagaagcatatcggccgcatatcccggcgccacagcgcccaggttctgcaatcccgcctccctggcggaattcagggtggcgctcttgatggctgccaccggctccatgccgtatcttatggctgccctgaccacatcattgatgtggccgttgtgaaggatatcatcggcctctctgtcatcggtgcagagacagaagttgtcaaagaaacggaaatccttaactccgctccatatggcctccacattcttggtgatggagctgtcccttgcatccacccgcatgccgcttctcatcttctccagggcttcctccgccgtcctggattcgtggcaggtgttaggaccgccgcacagataggcggacagcatccttccctccacaaagggggcgtggccctggaggtacaagccgtgctcctcagctgttctgataatatccatcatgcggtcgccgccatgaatcacatccagataatccataacttccgccagccccaccacccgctccagcttagccagctcctctatctgggccggcccaaactcggcgcctgcatgctccagtccgggcacagccggcacgcagctgggtatgtcaatcagctggcgcatgggaaggccctccgaagcctcatgcatataccgaactccctcaatgccccatacatttccaatctcatggggatccgtgatgaccgtggtggttcccttgggaatcactgcctttgcaaaattcctgggtgtcatcatggaactctcaatatgctcatgggcgtctatcagacccggaatcaggtattttccctgtccgtccaccacttctttcgcaaactgttcctcccggcccggctccttatactccacatggctaatgaagccgtcatatacataaacgctggccgggtaaatttccccggtaatcacattgaccagctgtacattctttatggccaaatcactttttatctctcccagagctgccctgagaagtgctcttttatctcttggctgtatcttcatctctatctttcccttctttcaactatcattttgtctgcaattctactatttaaacacaaaatacatgaccagcggaacagccagcacgtacatgaccggatgcagctccttaaacttacccgtggcagtcttgatgatgatatatgccagaatgcctgccgcgattcccgccgcaatgcttccgcagaaaataacaaacataatcatgacaaacgggccgaaggcttccgtgaaatcgctgaaatcaatgttcctgatgcctgataccatcaaaaatcccacaaagataagggcagggccagtggctgcgtccggtatcatcagaatcaggggcgaaaagaacaccatgacagcaaagagaacggctaccacaatactggtcaggccggttctgccgcccgcctccacgcctgatgtggattccacaaaggtggtgatggtggtattgccggtacaggctcccacacaggtgccgatggcatctaccaggaagggtttctggattcccggcatgtttccgtcctcatccagcatgcctgccttgccggccactcccagcacagttcccagcgtggagaaaaagtccccgcaaaaggcaatgaatacgtatatgatggcctggaaggacaacagtcctttgaaatcaaagcagaatacaatatttccccaggatgaaacatccggtatcttggcaaaggtatccggcagggtggtcacacccaaaggaattcccatcacagtgacagcaacaattccgatgaggatggccccgtttaccctgtatgccgtcagaacggcaatgataaccagacccagcagggcgataaatacagccggttccttgaaattccccattccgattccatttgtaaaggttccgatgcccgaattcttaaagcccaggtaggcaatgtagaaaccgattgccgacccaatggccacctttatgtttttgggtatggccttgacaatcaaatcccttaccccgaatatggtcagaaccacaaaaatcaggccggaaatcagggttatggccatgatggcgccaaaggacagggtattggactggagcagggcgccgaacatgaaattcgttcccatacccgttgccagcgcaaagggcaggttggcgtaaaagcccataagcagggtaataagcgcgctgatgacagcacatgtaaccgcaattgcctccttggtgataaccagcccgtttatatctgtaaaggataccgcatccccgaaaccaatgatggcgccgggctgcaccaccagcacataggccatggtcatgaacgtggtaatacctgccaggacctctatcttgacactggttcccctttcttttaacttaaaaaattcttctaatttttccatagcaatctcctttgtcagtcaatcttatctgaaacgcctgccgtctcaagcagaagccccagcagcaccccggccccgcgggcgcagtcctccctggaagtaaactcctccttcctgtgggacactcctccctctgacggcacgaaaatcatggcagtggggcacacatccttaaaattcatacagtcatggcctgccccgctcatcagttccataaaagaatacccctctgaccggcagatattctttatggcttcccggagaggttcatgacagcggcatggtggaagcgcctggtcaggccttaggctcacctccacgccgtggagtgaggacagctctgccccgtaccgctccatctcctccgcgatttccctcaggtcctcctggcggatggaacgcagatccagtgaaaacaccacacgctcacagattacattccgcgctcctgggtatgctgtaatggagcccacagtggccacacatgactcccgtgcccctgccagctccgttaccctgtcaatccaccggcacatggctggaaccggatcctttctggccttcatgggcgtggcgcctgcgtgtccgctttctccccgtatctccaccgtataccgcaccagcccggctatgccgcttacaacgccgatggacgccccatggtcctccagcacctttccctgctcgatgtgaagctccagatacgtccccacgtcctccatcttacaggaagccagctggccgggcctgcacccgtaatcagccatggcctgttccagggagattccatccttatccacggacgtaagtccctcagggtccagtatgccgcagatagatttactgcccaccatcccatatccaaagcggcttccctcctcgtccttaaaggctgccaggcgtatggtccgctctgtgacggttccctgctcccggatccttcgcactgcctccagggccgagaggattccaagggtcccgtcaaactgcccgccgcccggcacggtgtcgtaatgggatccgcacatgacacatggcttttcaggccggctgccgcagagctccccgatcagattgccggccgcgtcctcccttacggcaagtccggcgtctctcatcctggcttccagccagtcctgtgcctgccggtcctggggcgtaaaggccagacgggtaatgccgccgtccgggctgcgcccaatccttcctaactcctggatatccgaccacaacctgtcctggttaatatccatactcacacctcctttgctgcgcagtatgggccgtaccggaatctgtttaaaaattcagtttctagtattccacgatttcgccatacaatgctataatatcactattactcatattgttatctttgtcaatacagtttttcaggattcccgggcaggcgctctgtcatgaaccgtatggaggagctgtcagcgcatcaggacgcggaaggctgacacgctgaggctgacacacatttaaaggaggacgaacttgacaaccagaggacattccagaaagaaaagaaaacaaacaggcatcaaatggctctatataacggcggcaggactggtatgtgccgtaatccttgccgccatcctatttaaaatcagggccggcagcatggattcccggcgtccggccggaacagacgcctcacaggagattggggctgccggagacagggcaggtgacgggacaggtgatcccccaaattctgagaaccagccggatcctttaagtctatcggataaaaccaatgcagacaacacagataacgcagacatccgggccgtcatcagacagatgtccctggagcagaaggcggcccagctctttatcattaccccggaagcccttaccggctttaagaccgtaacccaggcaggggatgccacatacaaggcattgcaggaatacccggtgggcgggcttatctattttccccaaaacctgcaaaaccccggccagcttaaaaccatgacagccaaaacccaggaatttgcgtccagcctgaaccagcccccactgttcctctccattgacgaggaaggaggtaaggtggcccgtatcgcaaaccaccagggctttgatctgcccaaggtggataccatggctgaaataggaaagaccggggatacttccagggcatacgaggcaggttctgttatcggaggatatctggaagaatttggaattaatttagactttgcgccggatgcagacgtactgaccaacccggacaataccgttgtgctggaccgctcctttggttcggatccggttctggtaacacagatggtgaaggcctacatgaaggggctggaagaacaccatgtctatgggactcccaaacactttccgggccacggggccacagagggggacagccataagggatttgcttatacctataagacatgggacgaactggagcaggcagagctggttccctttgccggcctgattcaggacaacacgcccttcattatggcaggccatatctctctgcctcaggttacaggagacgacaccccatcctccctgtcctcccaagtgctcacagattacctgcgggagactatggggtataatggaatcatcatcaccgacgcccttaacatgggagccatacaggacaattatcccccggaccgggccgctgtcatggccctgcaggcaggcgctgacctgttgctcatgcccgctgactttaaggaagcttataacggggtactggatgcagtaaaaacaggagaattgacagaggagcgcatcgaccagtctctgacccgcattctgggcctaaaactgacccttccccgtcacaaacgctgagaatcacacctgaacatttcctcccatctatacaaggggacaggtataaatagaacaagtataatagaacaagccgccctgccttcgcaaagcggcttgtcctgccttcttctacagatcgttctcttccaaaacgttccttatccaatcagttccctgatataagcggccagcttctcatctttacattttccaaagaacagttccccgaacttttctcctgaaaacgcgcctttcaccagttcctggtccagtcccttaaagatttccaccagatcctccctgaaggaagcctttctcacatcatccagaatccgcttgtttctctgctccggaacagccctctccctgggatatccctggccggaaggctcgcagaacagcttctcaaatatatattccaggttcagatcaccgccccagccaaatcccttggcaaatggaatggcaatggcgttcccgtcgttaatctgggcaaatgtataggcgtccagcgcatcctccacatggccgcaaatcacgcccgggaatgagttgcaggccagcatggctccctcgcccgtgccgcagcctgtaatcacataatccgccgcctttgcgttcagcagggctgctgccagaattcccacctgtacataggtaagctgcgcctcatcctctgctgtgtacatgccgtagttgtccacctcaaagccgtactggtcagccactttctttaaagaattgtagatcatgccattcttggcgccctggctgttctcattaatcagtgctatcctcatgtctccacctctcaactttattcttttggtttttcctgatattgtaagcatatctcccaaaagattttctgtcaatagatatataaccaggcatcattgcttcttctgttcccgcgccattttctccatgcgccacagggtcgtcctgctgacccccagctccttcgctatatcctgttttttcttcctgggcttcaaattggcatacacaatcccggtttccggctggtccgtttctttgtccggtgtctgagtgccgggcagagggccttcctttttcctgaatatcttcagcatctggatttccctgagcccgatttccgtggtgtcgctcagcacaatcaggcgctcgcagatattgcgcagctccctgacattgccgggccagccgtaatgggtcatcaaatccactgcctcctttgacagtctggggatgggctttcccatctcacaggcaaagcgggtcaggtagaaatccaccatttcccggatatcgtctcccctttcccttagcggcgggatagtgatgtccaacagattaagacggtaatacaggtcggcgcggaactgcccttcccggattttttcttcaatattaatattggtagcagaaataacgcgcacatccaccggctgtacccggttgctgccgatgcggcggatttcccgctcctgaagcaccctcagaagctttgcctggagcgatatgggaatctccccgatttcatccaggaaaatggtccccttatgggccagttcaaacaggcccgtcttgccgtttttagacgccccggaaaatgctcccggctcatatccaaagagctcgctctccagaaggttttccggcagggccgcacagtttaacgccacaaagggctctgcgctgcgcctgctctcccggtggatgctgtgggcaaaaagctcttttccggttcctgtctctcccacaatcagcacattggaatccacccggctgtaacgctttgccatgagaatattctcccggatggcagggctgcttccaatgatgtcgtcaaaggaatactttgccgtaagaccctgcttcgcaaggctctgccggattttagtctctgcctctataatctgctcggtgtagcgggcaacaatgatggcgccctttcccatcttgtccaccagcacgggcctgtattccgtatacagtttcctgtccttccactggataacctcctcccgttcccgtccggtctccactacatccttccatttaagggcaggacagacctcctccacgggacggcccgtgtagtcagcctgggaggagagctgaaaggtacggtacgcctggttattcaatgcctgaatcagcccgctgccgctgacggcaatcagggcatcggaactggtgttgaggatggtgctggtcatcttggacctggcccgctccatattgatggtcctggccgcatccatggcctgcttcagggcctgctctatggcgatatcctttgtgtggatgtggacccggttcaatgcctctttatcgcacagtccgcacatggtaccggctcccacaaacacatcggcgccattggccctggcactgtggatggcttccagggtggaggcctcgtcatggaccgtataatacgcaatctccgcctggcacagcttttccagctcggacacagcgctctcatccatataccgcacacagagggctatcttcttgggatggaactcctgtctggcgcaaatcagggctttcagtatatcaaagctggagagctgtatctccaccacatgcttttccggaaacagatacctgaggcggtcataagtcatgcccctggccactaatatgtcggcgtccccgtaccgcgacagggattccggtgtgccgaatacgtgaagcagctccaccctcacatcgtcctgaggctccagacggctcaccgccgcctcgaacctgcttttcatattcatatatggaataaacatccgcactgttaccatgaattcacgccctctttccctctgtgtctgccccatttgcgccaatacggaaatacgccgggaggaatcaaagcattctcatgccctcttctgccgcccggcgtctgtcatgggcctgcgctgcaggctgtctgattttcctactatttatttaccacattctgtggtgctccgtctacaaaatgtttcagattatccactgcaatgtccataagtctctgtctggattccctgggagcccaggcaatatggggggtaataatcatattcttggcgcccagaagaggattgtcctcgcggataggctctgtggataccacgtccactgctgccccgctgacttttccactgtccagcgcttcccttaagtctttttccacaatcaggggacctctggaggtattgatgatttttactccatccttcatctttgcaatggaatccctgttgatgattccctctgtggatgggaacagcgggcagtgcaggctgatgacatcggcctgagccagaagctggtccagggaagcatatttgcagttatctgtctccaaagccttgttgggatactcatcatacgccaataccttcatgcccagagcctccgcaattttggccgtgccctgtccaatccttccaaaaccgatgacgccgaatgtctttccggccagctccaccaggggatgcttccagaagcaccagtcagcattgtgggtccactcccctgcctttacacagtcagaatgctccccgatgtggtggcacagctccagcaaaagggcaattgcatactgggccactgcgtccgtaccataggttgggatgttggacacgatcacgcctgctgccttggctgccgctgtatcaatcacattgtagccagtggccagcactccgatgaactttaaattcgggcactgtccgatggtctgcgcactgatcggggttttattggtataaaccgcctctgcgtccccaatccgctctgcaatcttgtcagcaggagtcctgtcatatacggttaactcccctaatctttcaagtccctcccagcttaaatcacctggattttctgtatatccgtctaacactacgattttcatgacttattcctcctttttccaattattcaattctatcctatcttatgcgccactgtcaagcacacctccggcacaatgatactgcagacgctgtttaatcctctaccagcgcccaggccctgttgatgactctcttggtgttggccagtatgatatctccgtcctcgtctgcccacggctttacctccagggacaatacatagggattttccttattaaagaagccctcttccttcaggacagtgaagaaatccacaagctgctctgtgtcgttggcgctgtcagggaacccgaaccttgggtgctggtcgccgtacgcctcaaaaccttccttcaccaccgcattaccgatgtgcaggtgggtgatatagggacgcagcgtctgaatcacgaacctggaagtctcataggtggtggggaaatgggaaaggtccaccagcaggccgaaattgttgtgggtggtgcgcatatccgcagcaaacctggccgcataaggagccggcccgatgagggctgccttatccatgtcaaagtcaaacacttccagctccaccatcattcccttggttgcagcatagctgcacacagccctggtggtcttaagcagctgggcatatgcctggtcctttgtctccggttcccattttcctgccaggaaggcaattccccttgcacccatgtaccgggcctcatcaatggaatccatcaggacagcctcggccttcttcctgccttcctcgtccagatcattggggttaagctttggtcccagcaggcggggctgtgcgccgtagcacaccttcatgtggctctgggccagcatatcccttaccttgtcctttgtctcctggtcctcgatatgggttatctccagggcattaaagtattcgtcgcagcagatggtcttaacggaatccagtatgggataattcaccggaggatgggtcatccactgtatggttcctacctgaaaatatttctgaattgggtctttcataattaaatacctccttatttctgtttacaaatcttgtttgattcaattgcattagctcaatatgtatttatatatatcaaatgcaggtacttgtcacaccagctcccatgccaggttcaacgtacgttttgcatttgctataatcacttcgggggattcatccttccagggcttcacctcaaagcttacaataggccgtttcttctcacccagaaatccgatttccataagcgtcctcagataatgggccagctcctccacatcattttcactgtccgggaatccgaatctgggatggttgtccccgtatgcctcacagtccgggcttttaattaccgtgtttcccatatgggcatgaatgatgtaatccttcaccggcaagatgctttcttcgatggtctcatgaatcatggggatatggctcaaatccaccagcaggccgaaattcccatagtccctccggatttcccctgcatagcgggcagccagggctgccggaccgatgagagccctcttgtcaatatcatagtcaaagacctcgcagcagatgggcatatttcccttctcccctgcatacccgcacagctgcctggtagatttaagaagctgttcaaaggcctgttcctttcgtccctcgtcataccggccggacaggaaggaaaaacctgcgcagcccatctcataggcttcatcaattccttccttcagtgtgtccactgccatggcccttctggtttcatccaggtcattgatgttgagtcccgcagacaaggtcctggactggccgccgtaagcagacaccatatgggccgcgcggatcatctccgccgcctttttccggacctgcccgtccttcattctggccacctccacggcttcaaaataatcatccccgcagatccgctccaggcattccaggataggtccctcgcctcctcccagctgcgggtaggatacgtggagaatgattcccaccttcataaaccttcttatggattgttccataggcgcgccttccctcctgactttttatactggtttttaacttttttgtattggttttctgcactgattttcctgtattactttttctgtacctgcttgcgcttcatcactttttcacatttttctgcgatggattccgggccatagccgtatttcaccaaaagctgttcataatccccggattctgcaaagtcagtggccccgatgcgggtcatgggtaccggcatatgctctgccaggacttccgccacagcgcttcccagtccgccgcagacagagtgttcctccacggtcacgatggcgcccgtctccctggcgcattctataatcagttcctcatcaataggtttgatggtatgcatatccaccactcttgcctggattcccttttcttccagaagctctgccgctgccagggccttgtgaagcacggttcccgtggtgataatggtcacatccccgccttccctgaccgtaatgcccctgccgatctcaaatttcatatcctcaggataaaacacaggagctgccgcgcggctgagccttaaatagacagggccctgatgttctgcaatggcaaataccgctttttttgtctccactgcgtccgccactgtaatcaccgtcatattggggatggctctcacaaatgccaggtcggtaatggcctggtgactggctccgtcataggagtccgaaagcccgcagtaggttccgcagagcttcacgttcagcttgtcataggcaatcaggctctgtataggatctgcccctctggtggtcaggaacaccgcgaatgtatttacataaggaatcagtccctccctggcaaatccggctgacatggataccatatccagctcgctgatgcccacattaaagtaacgttccggaaatgcctttccaaaaattccgctctttgtggaggaagccacatccgcctccaggcccacgatcttctcattctgttctcctaattccttaagcgctgcgccgtaagcgtcacggattgctatgttttctcccattatctggcacctcctaattctgcttttgcttgtgcgtattcattatcattgatggccttgccgtgccaggtgttctttccttccataaaggaaacccccttgcccttcacggtggcggcaagaatcagggaaggacagcctttggtcttcttagcctcctccacggcccggcagaaatcctccacatcatggccgtcgcatggtatcacattccacccaaaagccttccattttgccccgatgtctcccatgggcatgatttcctccagggtgccgtccagctgtacaccgttgttgtccagaatgccgatgagatggtcagccccgaatttggaggcggacatggcagcctcccagatacagccctcctcaatctcaccgtcgcccatgaccacataggtataggcatccagtcccttaattctgtctgccatggccatgcccaggccggcggaaagtcccagccccagaggacctgtggacagctccacacccggagttttatgtacgcagggatggccctgaagcatgctgtccatctggcgcagggtctttaactcctccttggggaaaaagcctttctccgccagcaccaggtacagcatgggggccgcgtggccttttgacagaatcaggtggtcccttccctccatctcaggctcttcaggattcacattcatgatttcaaaataaagggacgtcagtatctccgtgcatgacagggatccgccgggatggccggtctggatgctgtgaagcaggtcaatcaggtcgttccggaatttgctgcattgtctctgtaactcctcttttctctcattcgtcatctctatatctcctccaattttttcttgatttcttccatacacagcctgggactggtaaggacagggcagcctgtaatggaagctgtctcgtcctccagatgggccatggacgcctgggcaaggacaatgcagtcatagcccttcagttctccggccttttccctgagaatcatgtcgtgcttcttcatgtccatggctttcatggcaaagaatgcatccatgcacacgcaggtggatatgtctgcttcccttcccgccttatccgcctcagccttaatctttgagacagtgggccccaccgtgctctctgccgtggccatgaccatgatgcgctttccgtagagaacgctccttctggccatggcatcgtcgatggcaatgacgggaacctggataaaaggccggatcagttccaccgccggggtcagggtggagcaggtggtgacaatgatatctgctcctgtcagctcctgggccttcatatcgcagaacagacggtttcggttctggatggtaaactccccaatctcgttgggattattggccagaaaatcgtcccacaggttatgtatcttcacttcatatcccagatagtttctcaggctgtcatcaaagcccgatgccacgctctttaccgtatgaatcaacgcaatgcttttcattgtttcctcccgttttcttccatgtgtgttattcacctgttttctgcatcagacagtccgtccgtaaacccggtccgcaatgggccgcaaatgccggatggcgcccgctgccgcctcctccatggaaggaatctggaagatttcggtacagaaattgccgtcatatccgcattctttaaaggtggtgagaatcttctcaaagtccagaccgcagtggcccggataccgtctgttgttatctgccaggtgtacgtggatattgtaggagctgtacctgcggatggcctcatagatgttcttctcctccagattcagatggaaaatatccatcatcagccggaaattggggcggtccacacggtccaccatggcagccccctctgccagggtattgatgaaattcgtctgcataatagttactgtctccagggcaatgttcacgttcctgggtgccccgtagtcagccagctcccgaaaggcctccactgccaggttttcggtttcttctctggaaagttctccgcagtactggcctctcacacgtccgatgttgatattggctcccagaaagcctgcaaaatcaatgatttccctgctcctgcggatagcctccttccggatctcctccctggggtttgtatagcttaatcccagctgcccgaagatttcccctgtacataccagtataacagacaatccgttcttttcagctgtttctttcacttcattccagtccagtttttccggattcagggtcatcagctccaccccgtcgtatcccagccttcccaggtccccgaagcttttctccaggcttccctggtatgctgtcactgaatcagcgattgccacatctggtgtggccacctgataacatagtttcatctccaaacctccttcagtgctttgccttattaataagcaaaaatcgtgccaatttcaaaacacgttgaaaccgttaaaatccgttccatttgtcccaaatatttgaaacattccttactgatttgtcgcatttgttttttaatgtttcaattcgttttttatgtttcaaatttttccggcatcagtgtttcattttgttgcgtcccctgttttccctgcctgtttcagggtacaaaaagggagaggatgcggctccggttcccatatgtcccgttccggtcctctcccgtgttgattggttttctaatgcatcagccgtgtttcagccgtgtttactggattccgttggcagccatgaagtccttttcataggctgtcacatattccgttgccgtggcagcatccatatagttgccaatcagtttgttcttttccagataatcattcttccatgtatcggtctcagcaaccttgcccaactgttcactccagtaagcggccgctgcatcgctcatggctgcaggggctgccacgccgcgccatacagggacttccacattttcatagtctccgatttcgctcagtgtgggggcatctgccaggttgccggtgtagcgttccgtggacagggccagcacaggaatcagggaaccggctgtcacatactcagaagcagccgcaggcttggagataacaaattccacatggcctcccagggctgcggtgatggcgtcgccggtggagtcataggtgatataggacatcacgtccttgctgattccgatttcctccagcatagcatcataggtggcgatatcatctcccttggatccgccgatgacgatctttgtaccatttttggcagcctcgattgcctccttgaaatcagcatacttggtctgctctcccttgaaaataagctgtttgtcaaccgccataatggccaggatacggaaattggacgagcggttctttgtattctggaccatgggcattaaatcgccgctgttaaaggtgagaagggtatagtcagccttgctccccttggtggtagccacctcgtttctgccgatttcaccgcttccgtccgtcttattggtaacaatgataggctgtccgttgaccaggttttccttggtcatgatatcggatatcattcttgtgtagatgtcgctgccgccgccgggactggatgtaacggtccagttaatggtttcctttggtgtgaatgtgccgtcgctgctgacggccttgcttgtacatccggttactgctgataccatcataagtgctgccattgccattacaatacttcttttcttcattattaaatacctcctcaaaccatgttcttaaatatatgaacaaacctgcaagttacctttgttatgctactttgggaatattacgtttgttgtaccagctgccggatcattacagccctatttggatgcccttgcctttttaaggacggcctttaccacaggtgtgcagataaatgccaggaaaatcagcatcagcacgcaggtaatgggtcttgtaaagaaaatgcccaggcttccccccgatatgataaacgcctttcgcatattggactccagcagcttagccagcacaaaggacaaaagcatgggagccgtgggatagtcgttcttgaccagcagatatcccagtatgcctgacagaaacataatcagcacgccatacatggaatagctggagctgtaggatcccaccacgcacacaatggtgataatgggaatcatgtactttacaggcacggacaatatctgaatcaggaacggaatgacgccgattgccacaaccagcgcaaatatgttggagaggaacagggatgcaatcaatccccatgtaaattccggttcattggtaaacagaagcggtcccggattgagcccccacatcatcaggcctcctaaaagcactgcgccagtgccgcttcccggtatgcccagggccagaagcggcgcaaatgcacctgccgcggccgcattgtttgcagcttcgctggccgcaatgccctctatggcgccggttcccagttcttcctcgttcttgaatttcttctgggccgcgtatcccatgaaagcgccggtggttgcccctgctcccggaagcacgcccacaaaggttcccatgacgccggagcgcagggcaggcggaagcagacgcttgaaatcatgctttgtcaggatacttccgcggatggtaagcttcatgtggggctctgatttcacctcattgctgcgctccatcaccagtttaataacctgtgaaaatcccactgtgccgataatgaaaggcgtaaagggaatgcctcccagcaggtacatactgccaaaatcatatctgggagagcctgagagagtgtccatgccaatgcttgccagcagaatacccagcatggttatcaccacgcccttgatgggattctcacccaccagccagctgatggacgtcatggcgataagaagcagagccgtcatctcggacgggccgaacttaaggccgatatccgccagggcaggtcctgtaaaggtcaggatgatgatgccgatggttcctccgataaaggaggccatattggctgtaaacagcgcctgtccgggacgcttctttttggatgccattgggtagccgtccatggctgtgcagatggccggtgagtctcccggaatatttaacaggattgcgctgaaggcgccgccgtacatattggagtaatacaaagctcccagcataatgatggcagtggtgggattaaacttgtaggtcagcggaagcagcagggccacaccggccagacttccgataccgggcattgcccccaccacaaggcccagaaccgctcccaaaagggcggctcccacattgctgaaggtgaacagcgtggagaagccatgcattaacagttgtatattttccattttgtttacccccttctacaagaatgcttcaaaaagccccattggaaaatggacccccagccacatacggaacacaccgatggaaatggccatacagacagcaaggacaatgagagtttccttccatccggtcttctcaaacactttcagccacagtatcacaaacaaatagcagctgggcagcagacctataataaaggaacccgctatgattccagctccccctgctatgaccatcatctcatcccgctcatacctggcagccttctcttccttcagggactgaaagaaagaagcaatacttgccaggaacatgacgatagccatgatggccgggaagaaaccaggctgaggaccgtccacatcctcccagaaccccagctgtgtaaaaccaaccactgcaaataccactgcaaatactgctaacaccaagggtacaatctgctttgtacctatttttttcatgtaaacccctcccttttatcagcagcctttcagatgggccgccatcttggcagccatcttgaccgcattctcaaatgccgaagtcttaacaattccctttccggcaatatcgtaagccgtgccatgggcgcatgtgacgattggcgccggaagtcctcccgcaatggtgatgccctggtcaaatcccttcagcttaagggcgatctggccctggtcgtgatacatggtcaccactccgtcaaaatccccgttaaaggccttgatgaacagaatgtcggatgggaacggtccgttggcgtcaatccccatctcccttgccttttcaatggccggcgcgattacatcaatctcttcccggccgcactttccgccctcgccgcagtgaggattcagggctgccagggcaagcctgggcttctcaataccggaattcttaagggaaacattggccagtcttatggctctcatgatggtatccacggtcaggctgtcgctgaccttgctaatcggaatatggctggttgtccttgtggtccacaaatctcccagcacattgatttccccaaacggctccgtgtgtccaaagagatgggccatgtaatggtgctcgctctcaaaaggacacccggcctgaatcattgcctgcttatttaacggggcaaagcagaatccgtcaatcctgccggcctggtaaagctcaatggctgttttcagcatgttcaggcaggcgcgtccgctttcaatgctgatgttggcaaacggaacctgctcagggtccacatccctttgatccaggacaggcattcccttggtccagtctgcttcctccaccttgtcaatgacctgcaccgggatttccagaccgcatatcctggcacctctctcaaacaccctgacgtcccctattaccacgggacggcagtattcatcgtaaaatctggaagctgccagcttgacaataatttccggccccacgccggctgcatctcctaataagattcctaaaatcggtttaccgctcataaaaaaatcatccttccttctattttggtttttatttctgctcttgacttatgcctgtattaaaagcaaaaagcatgccaaacttttcaggaagaacgattttttctgttttacctccgggaaccctttatttacgttatgcattttgcatatatcaacatcatttataccccaatgtattcatacttttcacggcataaacgtttcattatcactattatgttttacttttgtttcaaaatgtatttttgtttcataatgtttctccgtttcagcgcaacccctgtgcccggtgtttcttgtcagccgtctaaccctcaatgccgtattttttcatttttctccacagagtactcttatcaattcccagatatgcggctgtcctgcccctgtgataaccgcacagctccagggcgtccttcacggcctgcctctgggcttcctccagacggggcccgcggcccgcggcctccgccggcacatgactgccggacgccggaaaatccgcgctgccggaaccgctgtctgcatgccggctttctgcataccgactttctgcataccggctttctgcatgccggctttctgcatgccggctttctgcatactggctgtcttccccctccccgtgctcccactctcccggaagggcctggagtacgtcctctgcccctgcccttgttttctcgcagagaatacagatacgctcacagaaattgcgcatttccctcacattccccggccagttgtaacgcatcagaagttccctgccctcctgggttattgcctccagcctgctccctgtgcgctcatgttcaaaccgcaccatccggtccgccagataaaggatgtcctgcttccgttttctgaggggcggaagattgagttcaagcacatccaggcgatacagcagatcctccctgaaattcccccgggacacctccttctttaaatccctgttggtggcgcagataacgcggacatcaatgggaatcacggtgtcattgcccagccggatgatttccctttcctgtatgaccctcaggaggcggctctgcagctttggtgatatatcgcctatctcatccaaaaaaatggtccccttgtgggcaatctcaaaaaatcccattttcccgcccctggacgctccggtaaaggccccttccacatagccaaagagctcgctctccagcaggttctccggcaatgccgcgcagttaatcgccacgaaaggccccttccttctgcggctggagttgtgaatgctctgggcaaacagctcctttcccgttcccgtctccccatgaatcagtatattggaatccgaatagctgaatttcacggcctggctgatgaccgcctccatgcagctgtccctgtaaagtatgtgggaaaagtcgtacctggccgtaaagccgtccgaatgcatacgcttgcgcagtttgccctcctctgcctgtatctgttccgttccctggaaggtgagcacgcagccgaactcctccgagtcaccggccacaggcacacaattgaccagcacctgttttcctccgaacctgcacacctccgacaggatcttttgtttgtccctgatcacactgtcaaaatcaatatccggaaagaagtcctttatatgctctcctgccagcgaagtctttctgtccttcatatacgtatggcagcatgtattggccagggttatgattcccttcctgttgacggaaataatcccctggaaggagtagttcatgatatttgctatctcatcccttttctgcctctcataccgggtgagatgggccaccgctatggcctctgaaatggcatggtttaccgcctcgattcctgaatgaatcatggcagccggcatacccagacgctccgcgatctggaccgtggaatatccccccacaatggcctggttcccgtccttcatagcctggtgcaccgccatctccagcttggtctcatcgtcctccgcatagcagcccagccccaggttcggatacaggtggcacatctgctccgccccatacaccatattgaaggcgcccaccacggcaatcctttcaatattccccttctgcatacattcattgactgccttcatcacatcgtatcccgtggatttaagctctgcacacggaatgtttttgcgctttaaggtatgggccgtaaagcccctggctataaccacgtccgcctccacctgttccagtctgttattgtagaaatcctggacaacctcatactgaatggcttccgattcaggccgttcccggaacacctgctcaatgacaggaagaatgtccggatatggtgcaaaaaatacaattttaatcacactcttccacctcccattgtccatattatcctatgtattgtatttttgcaatcattaaattgcattttattgctaaatagcaatctttatgcaattttatatattccaactttttatttgtttttcctttttttattgtgcaaatagcacatattttctcatgcaactttagctgttttaaataaaatttgaatctgtttcaccctcaaatagttttttggcacgacaattgcttttttaatcagtcagcagcattgcaatggcatgtaaaatcaaccagcggctgacgcatctcacatggccggtgagcatggaagcccacgtaaaggagaagagatttatgaggatattagcgacaatgaagcgttttccggcaggagtgatggtgattcccctgctccttggatgtgcaatgaatacctttttccccaacgccctcaccatcggaggttttacctcaggcctgttcaagaacggggtccccaccctgattggcctgtttctgttctgcagcggcgccaccattgatgtaaagatggccggcagcacggtatggaaaggcgttgtcctcaccgcccttaagttctttatcggtttcggcctggggcttctgctcaatgcactgttcggcgaagcagggttcctgggactggcgcccctggctgtcatcggagccgtaaccaattccaacggcgtcatctatgccaccctggcaggcgaatttggtgatgaaacagatgtgggagccacctctatccttgccctcaatgacgggcccttttttaccatgattgcattgggcgcctccggcatgggcaacttccccataacagatatcattgccagcatcatccccatggttatcgggttcatcatcggcaatctggaccatgagtggagaaaaattctggccaccggcatgattcttctcccgccctttaacggctttgccctgggtgccggcatgaacttcaacaatatcctgagagcgggtatttccggtattgtgctgggccttcttaccgtgctggccaccggacttcttacctttttcctctacagcgccctccgcagaaaggcggatcccatgggcgctgccatcggaaccacggccggggtggccaccaccacgcccactgccgtagccatggccgatccttccttccagcctcaggtggaaacagccactgcccagacagctgccgccgtggtaatcacagccgtgctctgcccgctgctggtatcctggctgtccaaggtatcccgcaaatggaatgaagctcacggcatagctgcagacattcctgtctctgaacaggagggctgcgaaacccagccagcggcaactgctgatttagactaaaccggacaaatgatattgacagacggaggaaacagacagacatgaagcgaaccatattaaatgcaggaatgattttgtgcggggaacagcttactcctttggagaacggctcccttatcatcgaagacgggataatccgggaaatcctgccccggaaagccagggaggccttgtacttggaagatgcaaaagaaatcagccttccgcacatgaccctgatgccgggcatgatagagtgccacaaccacctgtgcattgatgcagcccttccggaacatctggagctgctggcctggagcaacgaatgccagctgaccctgctggcattaaagggacttaaggaagacctgatgagcggtgtaaccacagcccggtgcatgggggataaattctatatagacgtgaccctgaagaagctgattgaggacaaaaaagtggacggcccccgtctcctggccgcaggcatcggcatgaagggaagccacggagcaggccacatcggaatgccccactgcggagccggagaaatccgccatacctgccgcgagaacctgaaaaaaggcgcagacctgctgaaactcttcataacccctggtgttccggatcccgccagcacctttgtgcccagcttcctcagcctggaagaaatctccgctgcggtcagcgaaggcgctcgcctgggcatccccactgctgcccactgtattggcggccagggcctgaaagactgcattgacggcggggtggatgtgattgagcacatgtatatggcttcggaacaggacgtggagcgtctggccgcttcccgctgtgtggtggacctgacctccggcattttcttagaccccagccgtgaggaattcctctcgcccgccaatgccctgaaggtaaggctgaaccgcagccgggtccgcgaaaatgtggcccgcatcatcaaggcccgtctcccctttgtcctgggaacagatgcttatcacggctttctgtaccgggaggtgggatatgccgtggagctgggagccgaccccgtaaccgccatccagggcgtcacctcccgcgcggccagggtctgccgcctggaagacagaatcggaaagctggaaaacggtatggaagcagatatcattgccgtggagggaaacccgctggaggatgtatcccgtctttcacaggtaggactggtgatgaaaggcggagtggtgtacagacagccttagagacggcccggatatacagaatgtattgactgcagttttagatgtacagtattgaatgtgcagtactgaatgtacaatattgaatgcacagtattggatacacaatttcaaaagcgcagtttcaagtgatactttgctgtcacaaaaactgcgctttccgtcataatacacttcactataagacgggatgaaaaaggaccgccgcccggatatacggctcagggagtccccttatagcgcttcagatactctccggccgtgtcccggctcagagagaacatccgcaccagtttatccaatatctgtccttctgttttcccttccttccgccttagcatcctgaagctgatacatccgttcttcccattcctgcatatatctcactccaatctcttcactggctttaacctggctgacccgctggtgcagttccttaatcctcggactgctgcttccggccgcctctgtttcagaggtgtgttctatgtaatgaagcagctctatcagctccccgcttactccctccggcacagttccatggtcccgcggtcctccataacacatgcaaataaaaacggtccagcagggtcagctctgccagcggcttcatgacaggcccgccagggtcattcattttcttcatcctattctccttttattatacaaaagctttgcctccgttgcaagaatatacacgaatcacctatcctgaatcacatatccatagaaccaccgcctgacattttaaaaacattcaaccacacaacacagggatacaggggagaaactcccttacgaatatctcggacagaacgcccgcaagatttatatatacattaataatataaaaaggctgcccgaaatgaatccatcccggacagcaacacaaagccatgcctgcttcagccaatttcacgccatttacacttttcttcccggcctatttccggcccaggctcattccggccttcagcatcctgaatgtacggtccgcggcactgatatacagctcttcggcccgcttaagggcctcctcgatatccatggcgccatttatcgtagttataatactgtcaatgccgtaatcaaatatcgtctcagccttgtcgcccatacctcccacaatcgctgccaccgggatgcctctctccctgcagcgctttccgattccgctgggcacctttccaaaagcagactgccagtccattcttccctctccggtaattaccaggtccaccccctccaggaggctgtcaaaatgaaccaaatccagcaccgtgtcaatacctgatttaagattggccttcaggaacacgcagaatgccgcccctaatccaccggcagctcctgctccgggaatcttatccacatccacgcccagcttttccttcaacagggccgcataacgaatcattccgccctctaacacatccagaatttccggtgtgccgcccttctgctttccaaatgtataggtcgctccatccggtcctgtaaggggattggtcacatcgcacatgactgtgaaccgggactgtgacaccgcagggtgaatccggctcacgtcaatatcagccaccctggttaaatcccggcctctgccctccagctcatttccctggtcatccaggaatcttacacccagagcacgcatggcccccatacctccgtcattggtagcgctgcctccaatggctattgaaatcttccggtatccccggtccagggcatcctttatcaattctcctgtgccataggtggtggtgttcagaggattgcgcctgtccgccggcaccatgggaagcccggaagcagctgccatctcaatgatggcggagtccccttcaaattccccgtaaaaagactgtgcctcctccatcagaggtccatggaccgtcagtctgcggtatgtgccgttcagcgccgaaatcaccgcgtcaatggttccctccccgccgtcagccacaggcacgccagctgtctcacagccaggaaatgtctgctccgctgccgcctccagaagctgtgtgatgcgctctgacgacagggtccccttaaatgaatctgatgcaaataaaaatttcatggttccgcctcccaaatgtgattgaatttcttaagtctattgtactgtttccaggcccctgcgtcaatgttccacaaaacacatattccgcatattatttattcctcagcacaacaaacttcacggcaggacgcggcccgttctgctgcccgcacatccgcctaatcctgcatcatttccttcacatcccggaaaaacaccatagccatgtaaaacactgccgactggctcagtacacgcacgtcatatcccgtcagctcctccagcttcctgagcttataggtcaatgtattcttatggatgtgcatggcatccgaagcagccttcagagaaccttccgcactgaaatatgcctccagcaatcccatccactgacaaagctcctcataaccgcagttcttaaagaccttgcgcaggtactccgccttcacgctttcagccacatcctccgtaaacagctccagggtaacgctgtcatacgtcatgacgtcccgtttagacatgctggcagagcgccatgccttgttggcctgtccatattccacatggatgtccctggccctgccgccgattcccatgaccagccctatgccaaatttctttttcacgcaggagcggatgcggccggccagctgttccatatggcggtcggacgcaccctgaaccagaaaaatctgccggcctgcattacgaaacaccagacatcccgcgcctgctaaagaagcagcttccccttctgcctgttccagcagtttctggcccgaagcagtggatgcatattcctggaagttcctgacaccggacaccatgacccttctgggaaccgaaatgtcgattcccagcgcaaagcctctctcctccagtattctgggctgaaggagcccgcttccaaggacccagtcctccagaaaccggttcagcacccgctgtcccatacggcgttcatcctgttccgcattttcgcgaatcagtatttccaccatcttcttcacaatctggccatagccagccacatcttcataccgtcccgtaataccgattacgccggcaatacttccagcctggtacacaggcaggttcagccccgggcgtgaggtaagcgtcgcttcctcatccctcacatacagctcatccagatgctccctgatgattttcctggccccctcatgcagcgtaccgatacgctccgggtccgtactggctatgacatagccttccgggtccatcatattgatatgctggcccacaatggcccccacttcctccacaatggcctgggctccctgccgcgaaagcctcagcgcctgacctgtcacttccatccattccacctgcctctattcagcctgcgcctctatcctgcctgcgccgcagccggctatatgccaaaagggggctgaggcgccggggacacccccagagccgcagctcccccatattcattcctgttccctcttgcttctgtttattacattttcccggatttactgataaatggggtatctctcacagagctttgtcacttcggccctgatataatccgctttattctcaaaatccgtggcagccagccaaatgtaccgggcaatcttgggcatgtcctcttccttaaggcccctggtagtaatggccggtgtcccgatgcgcacgcctgaagtgacaaaggggcttctggggtcattgggaaccgtgttcttgttcagggtgatataaacctcatcacagcggttctgcagttccttgcccgacacctccatgccgcgcaggtcaaccagcatcagatggttgtccgtgccgtccgtaaggagcttgaatccctcatctttaagggcctgggcaagagcctttgcaatggctgccacctggtgctggtatgccttgaattcaggctttaatgcctctccgaagcacactgcctttcccgcaatcacatgctccagcggaccgccctgggttcccgggaaaatggccttattgaaattaaatttctcagccgcctccttatttgccagaatcataccgccccttgggcctctcaatgtcttgtgggtggtggtggtcaccacatctgcataaggaatgggactggggtgttcgcccgctgccaccaggccggcgatatgggccatatcaaccatgagataagcgccaacttcgtcagcgatttcacgaaaccgcttgaaatcaatggtccgggcataggcgctggcccctgctatgataagctttggcctggcttcctttgcaatccgctccagctcatcgtagtcgatgaacccctggtcattgactccataaggtacgatattaaagtaaagaccggaaaaattcacagggcttccgtgggtcaggtggccgccatggtccaggttcatgcccatgaccgtgtcccctgctttcagcatggcaacaaacaccgccatattggcctgggctcctgaatgaggctgcacattggcataatcacagccaaacagcttcttagcccgctcaatggcaagtgtttccaccacatccacgcactggcatcctccgtaataacgttttcccgaatatccttccgcatacttattggtgagaactgtccccatagccatcatgacaggctcagacacgatattctctgatgcgattagttccaggttgcgtctctggcgcgcgcattccgcctgaatggcctcgcccacttccttgtcatatccggtaataaaatccattacttcattaaccattatcttacctcttcctttcgcaatgacagcctttttctgctgattataacctatataatagtaaattgcaagacatatggcagagctgctttctctttatctgttaattttttatcactgtttttcttaagaatttcataataattgtagtactttctttaaactttagacacaattcggacacaattataggatattatcaaactcgttccataaaaatttgtgtttagaaagtctcactgggaggctttcagaggaggaaaactattatgaagaagacaatcgcaaaatccatgacagctattatggcagcagctatgatcgcaggaagcctgaccgcttgcggcggcagcgacaacaaggccgagtccactactgccgtagagaccacagtagaggcttctgagtctgttgaggagaccactgctgaggctgctgacgctgaggagaccaccgagtctgctgatgctgaggagtccaccgaggctgctgacgctgaggagtccactgaggctgctgacgctgaggaatctaccgaggctgctgacgctgaggagtctaccgaggcttccaaggaagaggctgccagcgaggctaatgctgaggttgcagaggagacaactgaggctgctcagaactaatcttctttgccaaaaagggtgctgtccgctgcggcagcaccctctttttattccggagcaatgaagcttctgtaaaaactttctaacgaaacttccgacttccgatttctaatgaaacttccaattctttaccacaatctgcagattcctgtttccgttatactcatttatacccggatagtagataatatccataacacggcaatcacccttttcctccatgaacaaatccccatccgtaaaaatcacgccgtccatggctgttcccctgtcatttacaaggcttatgcgcaccacgttcctgttgcgccccataactctggcgctgcgtataaacagtcccttctgggcaaactggggcttctcatttccctgtccatatggttccagcagctccaattcctctatgaacggctctgttatgtattcaaatggcatggccacatcgatccacaccttgggtatgaaatcttcttcggtcaggcgctcccgtgcattttcattgagacggcgccggaattcgtccacatccttttcctccagagaaaatccggccgccatgggatggcccccaaacttcagcagaaggtcctgcacctccaccagggactggaacatatgatatgcctctatggaacgtcccgaccccttgacgcagccctcagcccgtgtaagcacataggagggcttattgtaccgctccctgagacgtcccgccacaatgccggccagggattcgtggcagtccggcagaaacaccaccagcaccttatcctcccggtacagctcatccaccatggctgccgcctgttcaatcccctcctgggtcatgtccttgcgctggtcattgagagcctttaattcctctgccatcctgtccgcctcaccctcatcctcacacagaaggagcccaagggctatcttggctgtctggagccgtccgctggcattgaggcaaggcccaataacaaagccgatatgataggctgtgatggttccggcctgaagattatttttctctatcagtttccgaagtcccagattagacgtatgtcccagtctggaaagcccttcctttacaaggatgcggttctctccctgaagcttcatcacatcccccaccgttgcaatggctgcgatttccagcaggctgagccattcctcccgtggaaccctatggacctcatagagcacctgcaccagcttataggccaccatgcctccgcatatatcgggaaacggatacaggctgtccctgcgcttgggattgaccacagcgtccgcaggcggcagtatctccctgccctccggcgtctccccggcctcagtcagtatgtcgtgatggtccgtcacgaccacggtcatgcccagctccttcgcccttgctatctggctgatagcggcaataccattgtcgcaggtaaggatggtgtcaatgccgtcctctgccgctgcctctataatcaactcattgatgccatatccgtccttaatacggtccggaatctcataatccacctcagcgccaatcctctttaacgcacggtagagcagatacgtggagcacacaccgtctatatcgtagtcccccacaatccgtatacgcctgccttcagccgccttctctcccagtatctccactgcccggtccatgtccggcagcaggcggggatcgtgaagctgctccacagagccgtagagataccgtcctatatcctccatatcctccagaccgcggttgcgtatgattctggccgtaaccgggctgatatggtattgttccgcaattctatcaaaatctgccttcttggcgtataacatccatcttgcttctgtcattcttttgtcctgtccttgtcttgtcctgtccttgtctattcttcctggtcccccatgaccgaggagtaaatgataccggccgccatccccgcaaatgccggaacaatccaccccaatcccgccccgtatccaggcaggaacgtagttgcctgtgtgaggaagggaatcacgaatttactctgttccagagcatataccacactgaccgcgcctgtaaacaggatagcagcgggatacatggccggccacctctttgtcagcggccctaaaaacgccagtacaatcagcacaatggcgattggataaatggcgttcagaaccggcactgacacggccagtatcttattaaggcctgcgctggatataatcaggctgatcagggcaaacaaaaacacccagactctgtagccgattacaggtatgatagaattgaaatactggctgcagcagctgagaagcccaacacatgtattaaagcaggcaatcaggaaaataagccccagtatcatcataccggcatttccaaataggtttcccgcaacgtaggtgagtatccttgccccattgtccatgccgcgggccgcagctcccgcaggcgcaccgatgtgggccagggccgcataaataagggccagcaaaatgcctgctataattcccgccttgatggtttccctgacgatcgcaccctcctgctccactcccttggcccgaatattgatagcaatgataattccaaaattcagggccgcaatggtatccatggtctgatatccttccaggaaacctgccacagccgggcctgacttatagacagaccccggatctccgtaatgccccatgggccacaccaggcatccgataaaaataacgctgataagcaccagcaaggtgggacacagtatctttcccagtctgtccgtcagcttctccggcctgaatgccactgccatggcagccgtaaaaaacaccaccgaatacccgaactgcgccatggtctggaccgtaaagccagtcccactaactgtactgttcagggaaacgcccatctgctcaagaaccgggaacaccgtcatctcaaaggaagtgctggaggtcctgggaatggccaggcacgggcctatggagagataaataagaagggtaaacagaaatgcaaaggcagggtgcaccctgcctgccagcttgccgatgccgcctgagagggcaaccgcagctactcccagaaccggaagtcccaccgcgctgagcagaaaacctgacatagccttccaggtcatcacccctgcctgagcgccaagaaaaggcgggaaaatcaagtttcccgcaccaaaaaacatggaaaataaagtgaatccaacaagcagaagattctgcttcgacaatttctgcttcatatttttatccccgcttaatacaaaataagagataagaatcaaactttccccgctctttcttacctctgctcgtaacataataccacaaattacgacatctttcaagaaggttacatatttgttgcagctatgcggtcagcactgcgcggtcagccattccaactgttttctttcaattgccttctctctccttccaattaattttaattatttttttaaaaaccattgacatttccatccagacaagctataatagctcttgcgctgttagagatacaaatcagacagcagcatgcgtcagtagctcagctggatagagcatacggctacggaccgtagtgtcgggagttcgaatcttctctggcgcatgaagaaaacctcgcaggtgtaagccttgcggggttttttgttattcatagaattccgtcaaaaggtcatttatgtacaatctgcggactgctttcttctattaaattaatagacaggcttgttcagatgtagcatgacagcctaaacgaaaaaacaacttgtcacatttaataagaatcaagaatactatgtattaaggtgactgcagcaaaagctgagcctgaataattataacggaggttatttgatcaatatgtataaaggtaatttcgaaaataattttaattttgaaaataaggataataacgatacgttcgaacatagaaataatctggaaaatatagaatgccaggaaccgcccagatactgctgcgaagaaaaaaagtgtgtgttaaggccaaaccgcacttttatgaaatgcagcgtacctgttacaaccaacattcctatgaccacagcttcaggtaccacattcaacctggcaaatttaaacattgatacgagtaaattccacaaaccatgcatcaaattcgaatttacaagtaatatcttaaccgcagccgggtctcttacctttaatttccagattaataaacagtgtaaatatcagccaacctctttcccaattggccccgtatggaccttttccaggctggcttcgtctgtcggagaaaatgatacgtttaacttctcggtatgtgactgcgatatctgcgatgatgagtgctgcaacttcagcgtagtggtaaccattgaaagccttgaaacccagggcggcatcacagtcaacaacgctaccttgtcggcaattgttgtagataatcctttctgctgattttttacagtcaatgtgggccaagcataaaacgacggtctgtttttggaacgtttcaattacataccgtcgttctatccagcccatcttttgcagtcactggtccaactccccattactgaatgtcctccatcacctctctcactttttccagcatcaccggcgtcagcttaagaatccgctgctttttagacaccttccccacggcctcctcaaagctcatgccattaccagccgtcatcgcatccttcaccaggatatagtaaagcataaccgcctttttatcttcctttggaagcttttccttaagctgctgctccacagccgccttctgggctgtgcctcccggaaaaatacggtgcagatattcccgctcctcctgctcccgctcctccttgctcttaatctcaaatccgaatatattcatattcccctcctgctccggcaccaatagctaaatatagtacaagtataaaatccagagggaagtacgtcaagaagtttctcagtgttatctgtcacctattatccgttacttgtcatccgctgcctgtcatccgctgcctgtcatccgctgcctgtcatccgctgtccgtcatccaccccgtcccgcttccatatcatcaaacacggccttatccactgcgccgtcctgaaatgccactacagtggtgcacactgcgtccccggtgatattgacagccgtcctgctcatatccaatatacggtcaattcccataatcagggctatggcctccacaggcaggcccactgaggcaaataccatggaaagggtaatcagccccacccccggcacaccggctgttcccacggaagccagggtggcagtcagtatcacggtcagataatctgctacggacaggtggattccaaatgcctgggacgcgaacaccaccgccacgccctgcataatggctgtgccgtccatgttgatcgtggcccccaggggtatggtaaaggaagaaatgcgccgggacacccccatcttcctgtgcagggtatcaatggacatgggaatggtggcattggaggttgcggtggaaaatgcaaagcccatcacaggcaggaattttttcaggaacctgacagggctcagccctgtaaaacccttaagtatggccatgtagaccaccagcccctgtatggccagcgcggtcataactcctgccatatacttaagaaggggcaggaacgcgtcaaaaccaatgccggaaaatgttctggctgtcaggcagaacacgccgtaaggagccagcttcatgaccataaccgtcatctgcatcatcacatcattaaactggctgaataaattccccacggtctgaaccgcttcccccaggccggccagaatgattcccacaatcagcgcaaagagaatgatggacagcatatccccgtctgccagcgccctcaccggattcaccggaatgatggccagaagcgtgtctgccagtccctccttctcaccgatttcaacctgggctgtctctaaggaagaaaggtccagtcctgcccccgggttaatgacatgggcagtcagtatggctgcggtgatggccagtgcagtggttgccagataaaagcccagcgtctttatgcctattttcccaagtttttttgtatcccccatggacatactgccgcacaccagggaacagaataccaaaggtaccactaacatctgcatcagccgcagaaatccatttccaatcagataaaataaaccgtctatcagcagtttatcccggatatctccctcaggaacagcataatgaagaaggatgcccgcagcggcccccagcgcaagcccgataaagatagcggtggtaagccccggccgtttcctattttccatagccgataccgtcctttccctcagcccgcctgcggcttcctgcccgccgctccttcatgtattcctccagcatcaccttccaatggggcaggagacgcatattagatatgcgcagcatcatattgtccagcacgctgtaggaaggcctcatggagcttaaggtgtcctcagaggcattcacaggttccaccgggacctgataacccgccagcctaacagcctcctttgccagctcataccggctgcagcagccctgtcccgttacatggtacaatccgtcctcaccgtgctccatcagctctatgaccttggcggccagtccgtcagcccctgtgggagatgccatctggtctgaggcaaccctgatggtcttgccctggcccgccatctccagaatacgctccaggtaagggctgccgtccccgaatatccaggaactgcgcacaataatatggcggttgcagaactcccttacaaaattttctcctgccatcttggacttgccgtacacagtcctaggtgagaccgggtcaaattccgtgtaaggaaccaggctcctgccgtcaaacacatcgtctgtggacatctggaccagcctggacttacccattctggcggcaacgctcagattcctggcccccagggcatttacccggtatgcctcctccggacagtcctcgcaggcagccacatcagtcagcccggcacagtttacaatataatggggccggttgatatgggcgtattccatcacagcctccgaatccgtgatatccaccgaatccgcatccgtcaaaagcagctccaccggcctggacgccagaatatctgtcatcttcctgccaacccgtcctccagccccgcatatccatattttcagcatcctgctccatccttccatatataaatgaattgctctgctctttccataaatacatcaggtagtatctgcaattgcacgttcttcatacaccctccaaaacagaaggcaggaatgaaacacagaaatgaaacacagaaatgaaacacagaaagtgaatcctgcacagaagaattttccttacaaacaaaaaagcccggacagtaaacgcccggacctcttcgcagcccaaatcaaaaaaccatataaaaggccggtatgggcggccaatatcaaaataacttcttaagcactgtctttttcatctccatacgtaccgtgcgttttggatccaccacctggcagaactggagattgcccatggcggagagaagcataccggcatcctccaggctcatgcccagttccctcatgagaatatccgtcatggccttaaccgccgtatatacggcagtctccacgttctcatgggacgcaatggtatagcaggcttcgccgtcctccagcatggggttatctatggaaatgccctttaaaacctccagggtcacggttacctctgccggaatctccagcccggtcaccatgatttccccatcccccatgcaggcgtggacatctcccatggccagaagagctccctcatggaacaccggcaggtacagggtggcgccggcctttattttggtgttgtccatgtttcctccgtggctccccggctccccgcagggaatctcccctttctctggagccacgccaatcactccaatcatgggagcacatggtatgccgatgtcctggttaaaccaggccacgccgtccctgacgggaatccgcttcaccgttccccgggatacgcagtcccccaggaccccgttgtcaggtatggcggccatggtgccccaggatgccacccggatatcttcaatctttaccttcagcacatccccgggcatggcgccttccacatagaccggcccggtggcaggattgatgcagtcccagttcaggctgtccaggacgtctccctcctctgtgaactgattgtcaaagcaatcctttgtgacaaaggtgactgtctcatagctgcccgccctgcataccggaacagctgaggaggacatggcgaatatggtttttccctcaacccgcttcccctctgtccttcttgtctctgcctgcttaacctccatctgaccctctcctctcattatgtgtctcaaattccccttcaatctcctccagtatcctggcatagcggcagaaatcctgttccagccgctcccggtttctgggttgtttcttatagcatacccggtgttccatgctggcccagaaatccatggccatggtccgaagctgcacctccaccggaaaatattccatggtgtccagaaaatacaccggtatacccagcacaatgtgatagctcctgtatccgttgggcttggcattgcggatataatccttttccttgattatcaccaggtccgactgttttttcagcgccgctgtcagattatagatatcctccacaaagtaacaaataatccgcagccccgctatgtcctgcagatggttccttgcattggtcactcccgccgtaaatcccagccggaccagttttgattccatgctcttcttttcctttattcggccctggatattatggatgggaccggcgtcagacctgtccccgtaaagactgtggttgaggatttccagccgggtactaagtacccggctggcatcctcgtagggctttatcaattcataatactgctcatttgtcatcacacggacccccgcattctgtctcagtcagactgccgctttgggcagcttccacttctatccagcataccgataaattgtgagcattctgtgatggttttctatagaaattataaactccctgcttttctctccaaggacctgccgcacagatccgaaaacagatgattcatggccggggctgactccagaagactttcgggatgccactgtacgcctacaatcaacccctcctggtcctcgatggcctctatgatcccgtcatttgcatatgccgaggccctgagcccctttcccagctccttcaccgactggtggtgcatggaattggtcatgcagatgccgctgcctaaaagttttgacagcctggttccctcttccacccgtatctggtgggtaaggtaatcccgccttccaagctgcaggtgcctgatgcagtcaggccccttaagggaaaggtcctgatacagggaaccacccatgagcacgttgagcagctggtttcctttgcagatgcccagcatgggctttttgtgctccagggcataacggcccgccctcatcagggcttcgtcaatttcaggcttgtatacctggatagcgggatgcggatcctccccatagtaggaaggagtcatatcctccccgccggggaacaggattccgtcgcagattcccatgatttcctctgtctgctccataacggcagatgccggtaaaatcacagggatacccccgtttttcatgaccgcatccacataatagctgttctgatatgccctttccatgctgtcaaacatgcctggctgggtcatatatgtatttcccataatgccgataaccggacgttccattttctccacctccctacagtatatcctggcgcaggatatggcggatgcgttctccatccagccccttgattacctgggctgccagctccgtagccgcctccaggtcatcctttgcacagaaattataatgggaatgcacgtatctggaaggcacgcccagcacaaggaccggaaccgcctttccgataaggctgatcctgcccgcattggtgctgcctccccgccttaccgcctcctggtagcggataccgaatttgccggccagctccatggcgtattccatgaacaccggattggatatatagctcttgtccatgcggcggatctgaacgccgtttttcattcttccctgggcctgggtggcggaaaagaagaagtcatccgaaggggaaccctcaaacaggatagccaggtccggcttcaccacctgggtggttacggtggcccctctcattcccacttcctcctgggccgcaaaagcgcccaccacatccacggccagctcattcctgctgtcatataccttatccatggtatccacgatgcaggcgcagccggccctgttgtcaaatgccttgccgaagcagagaccgtgttcctcatcataggaaaaggacacctccgggaccatgggatctccaatggatacgccaaagtcctcctccacttccctgcggcttgtggcgccgatgtccacatacaggttttcaatgcaaagctccagggaagccctctccttatcattcatgaaatgcacgggctttgacatgatgatgcccctgattttcttgccggcccttgtttttatgatgaccgtgtgggcgggtaggttggtcaggtgaaagccccccagcataaggattcccaggcagccgttgtcatggatgcactgcaccataaaaccgcactcgtccagatgggcgtccagctgcaccaccggtttatccccggccctgcccggcatacgcacatacaggttgttcatggcgtcattttccacctggtacttaccgcagtaacccgccacggtgcgcaccacctcttcctcaaacccgctggggccaaatgcatctgatatctttccaaacatctctatatccattgctgttatctccttattcaaacgcgctctaatataccacaaagcaatgggccgtcaccacatccatccatctggctgtctccagcctgttggtaaatgtgtccactgccctcattcccgggtaaaaggacatctggtatgccttcttccagtctttataggtcacttcatatgtaaatgtctccggaagctccactctgcaccgggagagattcccggccagcgccttcttcactccctggcggatggattcctccacctgccccggcgccttgcagtaagtggatgcccccagaccggtctttgtcacggccgtggtaatatccggcaccatgtccctggccaggccgcagatggtgctgtccccggacaggaacagcaccggaaccttgtgtgaagcagctgtgtagctgttcagcatgaattcgctcatacagctgccgtttaaacggatgtacagactgttgcccgtggaggtgtggctgatggcaaatccgggatttcctgccggggcatggtatcctatgtacatgaccccgtcaaaggaatcatccagaccggacatcatgttataagggtgaccgcttttgccccgaatcagggtcacgtagtccggcatgcagagagggtcaatgttcgttgcgtccccgtggccgtcctttaccactatctcgtcggctcccgcctcatgggctgcctcacaggcagccaccacttcctttgtcatctgctttgcaaattcaccgtatgcagcttcattcttatgagtctcatacgccagggccacccctgcgcacccttctatatctgcactgataaagagtttcatcccttgttctccttgattttgtcatcatagagatggcagtatacataatggtcgtcagatacctggtagcgctccggcgccttttgcttgcaaatgtccatgcaccgggggcatctggtgtggaacttgcagccgcttggcggatttaatgccgacgggatgcttccctccagtatgatgcggtccttctttgccgttggatccggtaccggtacggctgacagaagggcctgggtgtaaggatgaaggggattgctgtacagcttgcgcttgtcccccacctccacaaagttacccagatacatgacgcccacccggtcgctgatgtgctccaccacgctcaggtcatgggccacgaatatataggtcaggttaaactccttctgaagctggtgcagcaggtttaacacctgggcctggatggacacgtccagggccgacacgggctcgtccgctatgatcagctccggctcaactgccagggccctggcgattccgatacgctggcgctggccgccggaaaattcatggggataacggttggcatggtaatcatccagtccaacctttctcagaagctccatgacgcggtcttccagttccttcttgctctttgtcaggccgtgtatgattaacggctccgcgatgatgtcaaatatagacatcctgggattcagggacgcatatgggtcctggaataccatctggacctttttgcgcacggagcgcatctgctttctgccataggaggagatatcctcaccggacaggacgatcttacctgccgtgggagtctccagcttgcagattccccttcccaatgtggacttgccgcagccggattcgcctacgatgccgaacacctcgccctttcgcacctcgaaggaaacgccgtccaccgccttgacgaattcacgccctttgccaaaatcccccttcacaggataatacactttcataccttcaacattcagcaggatatctgccatcacgcgtcaccgcctttcttttcacagagccagcagcggctcatatggccttctcccacgtcgtagaagccgggttcttcctccctgcacttatcaaaggcgcaggaacatctgggagcgaatttacatccctggggcatgtactttggattggggacattgcccggtatggattccagctcctcggcacactctcccagcttgggaatagatgccagaagacccttggtatacggatgggacggactggcaaaaatggaccttacgtcgcccttctccaccacacggccgctgtacatgaccaccacgtcgtcgcaaacctctgccaccacaccaaggtcatgggtgataaacagaatggaggttcctgttttctgcttcagattctccatcaagtccagaatctgggcctggatggtaacgtccagcgccgtggtaggctcatccgctatgaggattttcggcttgcacaccagcgccatggctatcatgactctctggcgctggccgccggagagctggaagggatattccttcatcatgcgctccaccctgggaacgcctgtcagcttcagcatctccactgccttgtcccaggcttcctgcttgcttatgttattgtgcatcaggatacattccgttatctggtccccaattttcatgacagggttcaggctggtcattggttcctggaaaatcatggaaatcttttccccgcgcatcttcctgcgctcctcatcatccagctttgtcaaatcgcggccttcaaacaggatttccccttccgccacctttcctgtggttcccatcagaagtcccatgacggacagggcggtcacgctcttgccgctgcctgattctcccacgattccaagggttgtaccctctctcagttcaatatccacgccatctactgatttaatcacaccgctgtccgtgtagaagtaggtgtgcagattcttaatctctaaaatattattattcgtattctccataagtcccactcctaatcagtcagttttggatccagcgcgtctctcaggccgtcgcccagcagattgaagcagagcacggtaaagaagattgcaagacccggaaacagggtgatatgccagcttgtcagcatgtagttacgtccattgctcagaagcagtccccactcaggtgtgggaggctgggcgcccatgcctaaaaagctaaggctggaagcagtgatgatggaggttccgatggacatggtgtactgtacgatgatattgggaatggcgctgggcaggatatgcttgaacaggatgcgcatgtcgccggctccgatgttacgggcggcctgtacaaacacgctgttctttgtctccagtgtattgcctctcaccagacgggcaaacttggggatattgaataccgcaaccgcgattaccacgttatacagtccgcttcccaggatggccacaatggcaatagccaggataagtcccgggaaggccagcagcacgtcgcagatacgcatgatgatggaatcaacgatgccgccgtagtatccggccaaaagtcccataatggttcccacaagcattcccacggtcactgcaaacagacccacgctgagggaaatcctggttccgcagattaccctggaaaacaaatccctgccgaactcatcggtgccgaaaagatgggcggccgtaggcggctgcataatggcagagtaatcatattcattgatgccgtaaggggcaatcttatagctgataaatgccagcaccacaagaaacaccagaaataccatggcaaccatggctgttttctgttttttaaactttcttacaaactctgaaaacggggtattgatgtccgtcttttcagttaacactttattcttagccatcttttgtcgcccccttttagctcaattggatttccggattcagcactgcgtacagtacgtccacaaccaggttaatcagtacgaaatgcagggaaaatataagaatcagcgactggattgcgggataatccctgtagtttacggattcaatcagaagggaaccaagtcccggaaacgcgaacacagtttccgtcacaacggaaccgcccagaagaaaaccgaactgaagtcccacaaccgtcaccacggatatcatacagttacggaacacatgcttccagataaccgtcttttcccgcaggcctttggccctggccgtacgcacgtaatcctccttcagcacctcgatgacagaggaacgggtaaagcgggcaataatggccgcaatgctgactcccagcgtgatggacggcagaatcaggttcttgaaggagccggccccggtggtgggcagcagcctgtacttgaccgcaaaaaccatgataagcatgaacccaatccagaaggagggcatggatatacctgagacagccacggtcattcctgtatagtcctgccacttgcttctgttccttcctgaccatacgccgataaggacgcctgcaatcacgctccaggtcaggcttaaaagggtgagctgcaccgtattcatgtagcggccctggacctcagtcagcaccgggcgcttggttctcagcgatgtgcccaaatccccctttacaagtcctgtcacgtagctgatatactgctggggaaggggcttgttaaggcccagctgctcccttaccagttccacgtcttctttggttgcctgcggtcctgccacctgcctggccggatctccgggaatcaggcgcacaaagaagaatacaaacgtaactacgataatcagggttggtataactccaacaactcttttacatatgtatctcagcatataaactctcacctctcatatcattattgggtatacaccctgtattttatcttaaaaaggtctggcagagaatccccctccgccagacccttaagccttttatttcgtcatcttaccatttctgatattaaggcagttatctgggaacatctttacatttaccatcttattggaagttgcccaggagttgaagtcagttgccagacataccagaggactctcttcccaaatcaggtcctgagccttggcatatgcttctgctctcttatcacggtcagctgtgttcaggccgtccttcagatatccgtctaattcctcgttctcgaaatagcagatattgtagctcataggaggctcagactcttttgccagcagaggacggattccccagtccgcgtcgccggtagaggatgaccagccgatgatgtacatatcaacttctgcctctgcgccgggagcgtccgtatcctggaccttctcgtttacaattgcgctctccaggctgataagctcaacatcaatacccacctcggcaagctgctgctttaagaactcgccctgcttcatgttggcggaagtgttggcaaatatcagggttgtcttaaagccgtccggatagcctgcctctgcaagcagtgattttgccttctcgatgtcgtatggataaggatcatttcccttgtagtactgaagcttgggagcaatgacagatgttcccggctcagagttgccattcttgacaactgccacatatgcctctttattgatagcatagttgatagcctgacggactttcttgtcattgaatggtttcttctggttgttcatcatcaggtaacggactaccaggccctggtcctgtcccacaatcacgtttggatcggatttaagtcctgccaggttttcatccggtacaggccagataagctgggcatcgccggactgaatcatggcaaccctggtggcggactcaggtacaggctttaaggtgatgctcttgaagccggcgtccttgtcagccagagccgtgccgccgcagatgtcagcgtcatagccccaccagtccttgttcagctcaaccgtaaggtggtctccctgaatccactctttaaatgtatactgtcctgtgccaatgggggcctctgcgcatgccgtggagccctgctcgattaccttggggctcatgaccacgcaggccggatgggccagtgtctcgatgaacgcgccaaagggtgaggacagctttactacgattgtataatcatcctgaaccgtagtggtatccagtatattacataacaatgtggttctcttaagtcctaaggacttgtccgcccaacggtcaaagttggctttggcagcctctgcgttccatggggttccgtcagagaatgtgattccctctctcagcttgatggtgaactccgtggcgctgtcattggccgtatactccgttgccagcatgggaatgattttcatttcgtcgtcaaacccaaacaatccgtccatgataagacgctgaacgcctcctgatagggtgtcgctggtatctaacggatccagtgtggtaaagtccacattgactgctcctataatatctgtttcctgtgaaacagactctccctccgcaacagctgccgctgctgtcgtttcttctgtagctgccgccccgcctgcagctgccgtggtcgtatcagtggtgcctgatgatgaaccgcatgccgtcaatcccagcatggcagcagccagtgccagggcgcacagcttctttccgcttttcttcatagaatatcctcctttttatgatgatacaaaaaaagcctggaaacctacagctctcacgctcatttcgtaagcatccttgcttacaataattttacacgtttctgtgctgccttgtcaaataaatcattcttttttccgtaaagcattcgttacaatttaaaatttaaagtcattaggttgttgtatcctaatttttttgttataattaacctaataagacacaggaggataaaacatggacagaagccagccaaaataccatgtgctcatcgtcagcatcaattccagcatacgccttgaattccagagctatctccacaagatattgggagcccatattgcctttgatacaattgggctggaccaggtccagcggccggagcaaatcaagggataccagtgcatccttttttccagccccctggtccagtcagaatttcccatatccatcccaaaggaggtcatgcagattatctgtaccaggaccttcaaccatgcctgtctggaccaaatcatccgcataccgcccggtgagcgagtctacatagtaaacgatacctatgactccattgtcaccatcatggaccagctcaaggaggcaggggtggtgcagtaccggtttgaacccttttatcccggatgcatccaggccgacgagtccatccactatgccatcaccgtgggcgagccccagctggttcccagccatatcaccaatgtcattgatatcggcaaccgcatcattgacatctccactgtcaatgagctgtgcgagtactttcatcttcccgccagcctgtccaaccagattaccaaatcctatgtgaacagcatcatgcagattgccaagctgaccagcgcctattaccaggactacatctattccaggcagcttctccagaccgttatcagcaatcttcccataggcctgtgccttctgtcggtccgcggggaaatcaatatggtcaaccgcagattctccatggacctggagctgcctgagacaggcaccacgggccggaacctgtcacagtttctgccccagccctgcaaaggcatggatttctgtcacagtgcggattacaaggtgatgaaccgcagcggaaagcatctcctgctcagctcccttgaactgctgctgcccaaccatgagcccctttacctgctcaacagcacgccgtgtcctgtgctggctgacgggaccggggattacccgcctctccctgaccctgtattctccgactccagatatgcggacagcatgttcaccagctttaccactgcctcggagcccatgaagaatatcctggaatatgccagaaggctctccctctatgacttccctgtgctgattcagggagagagcggcacccagaaaaaactcctggccagagccatacataagacatcctccaggaggcagcatccctttgtctgcctgaatatgcccatggggcttaatgcggccgcaaggataaacggggtctccggcccaaatgaagtttccggcccggacagcgctcccggcccaggcgtgctatccgatccgggcgggacctcctgtctgtcaggcgcagccctgactgtctcggatcctctctcccagatgttaggactgttcaaagaggccaaccacggaaccctgctcattgacagcgccgagtacctgtctcctgagattcagggactcctgattcacattcttcaggacaaccggaccggaaatgtcttcggaacccgcttctccccctttgacgtgcgcatcatcgccacagccggtcaggacctgtacgggatggtaaagcagggtaccttccgggaagagctgttcttcctgctgaatgcggcttccatcgacaccctgcccctcaggaaacgcagggaggacattcccctgctcatggaccagttcttccgtgaactgttccacaataaaagccttatggcccgcgaccttttgtcccccagtctctttgacttcatgatggactacgattatcccggcaatgtccaggagctatacaacctgacccgttatttcttctcccactacgccgcccatcccctgatactggcacagcttccctcctatatcaggaaccagatgcgaaagtccgaccaggaccacagtccggtccgcctcagggtgctggctgccatagctgcctccccccgcatcggccggggagccataaaaaatgccctggcagaggccggcgtggaattaagcgacggccgcctgcgggggctgctgaaagaattatccgaagaaggacttatccgcatcaaccgcaccaggggaggctgcgagataacagaacaggggctgatgtcccttcgccattaatgtttaagaatctgcggaaggaactctgacaggctgtaatacacctcccctgccagtcccccggtacgtccggctgctgtcatggaattcaggatggcttcattgacagcttccgcggctgccttaaaggccacgttaatcaggtcctccctgatgcaggtgcttgtcatgatttccggactgtcctttccctgcaggcggcctgcggtggtgaacccaatcatgacctcaccgctgccgtgtccggtgtaggcgcctgtcctggcaatgcccacaccggccctgcggatgatgcgctttagctgacggtcactgacaggcagatccgtggcgataatggtcatgatggacccctggtcctgttctgcggtggccatcttcctgcgcctttccttttcctccagaatccgttggccggcccggatgccgtctatgaccaggtcctctgtcgccccgaaattggactgcaccagaacccccagcgtgtaatttaccccgccgattctcataactctggaggcggatccgattccccccttcaggccgtagcacacagttcccgtgcctgcgcccacatcaccctcctcaaaatcctcaccagcaccggaaaatgcctccatcacatcctccatggacacagctctgtgctggatacggttaattctgcagtcattgcactcacccacaaccgggcttacggatgtgacctccacctggtccttttcgcactgcctgatggtatactccaccagggcgtcggctgccagccccacgttcagggtattggtcagggcaatgggcgtctccagggttcccagctcctccacctggaccaggccgcaggtcttgccgaatccattgtgcacatatcccgcagcgatgaacttgcgttcaaatacatttcccggtcccggcacaatgaccgtgacgccggttttgttgtccccatttctcactgtcttatggcctaccagcacgccaggcacgtctgtaatcttatttttaggcccggttttcatgacgcccggcacaatgccaaaatccctgattctttttctctccatcttctttcctcctcccacagcctccggcctccatgtggattatagtattgaattatagtattatgtgctatacattatttatagaagaaaagcccgcagaaacgccttgtaacttgcgtctctgcggactttcccatgtactgggccggcgggattcgaaccctcgagtgcaggagtcaaagtcctgtgccttaccgcttggcgacggcccaacaagccatatagtaatccggcatgccaaattataataccatagaatttaccggtttgcaagtttttgaaacccacttttgcataattcctgtgttccggacccttacacctgccccgccatctgcctgcggatatgtttccaccatacccatgccagcaatgccgccattgtctccgaaatgggaaaggaccaccacagcgcatccagcccaaacattgctgccagtatgcaggcggccggcagcagtacaatcagctgccggaaaaaggagataaccaggctttccatccctcttcccagcgcctggaatacggcgctgtaaataacggaaacagaggcggacaggtagccgaagctaatcaccctcagcgccgtcaccccaatggacatcatgtgctcagaggcattaaacattgccattatctccaccgcaaaaacctgggacagtacaaagcctgccgccatgatggctgtggcatatcccaggctgtaatggatggcctttcgtattcgctcaggtcttcccgcccccagattatatccgataataggtatcatgccgttattgaggccgaatacgggcatgaagataaaactctggattttaaaatagactcccatcactgccgcggctgtggccgtgtaggaaatcagtatctggttcagtccaaaggtcatgacagacgcgatggactgcattacaatggccgggattcccaccctgtatatctgctttatgattcccatatccggcctgaacccccggaaaacaaactgcacctcatggttgacccgcttgttaaaatagacgttcatccccatgccggccagctgccctgtcacagtggctatggctgccccgctgatacccattctgggaaatcccaataatccgaaaatcagaatagggtcgagaattatattaataacagctcccgccccctgtgtaatcatggtataaattgtttttccggttccctgcaatatccgttccagcacaacctgctccagcacgcccactgaaaaaatcaggcaaatggacaggtactgtactcccagctctatgatttcttctgaatctgtctgtaatttgaaaaacgtcctggtgaaaaacaacccaaacaccaggaagaacagataggtaaccagcataatgaaaatcccgtttacagctgtcttgttgacgccttcccggttttgttcccccagataccgggacagcagggaattcacacccacacctgtccccactgccactccaatcagaagattctgcaccgaatatgccagcgaaaccgcggtcagcgcctgttcgctgattctggcaacgaacaggctgtccactatattgtacatggcctggataatcatggatatcataatcggcagcgccatggtcaccagcagacggttgaccggcatgacccccatcttattctccccgtctgtccgggtctgtttttctatttgcctcatgttctcctcgtttaagcgattgatgaatccgccaaatcagaatctgtcaaaccggaatccgccaatccatttcccctcagttttactatggttccatagaccgtgcccgacatggccaccgcgtttgcctcatccgtgtcaatatgggcagccgtggaatagtgttcgctgacccgaaccaccatgtccttaaaaatcaacgaccggtcattgatatttacctcaaaagcaactgtttcacggtcagtcacccccagtctttcggcatcctccggcgtggtgtgtatgtggcgttttgccgcaataaccccttccttcagaataaccgttcccctggggccttccagtacacagctgccgcttccctccacatcgccggattcccgtatgggcgcgctgacccctatggtcctggcatctgtcagtgaaatttccacctgggtgcgctctctcacaggtcccagcacagacatggagaacttacccttaggtccaatgacgctcacccgttcctcgcatgcaaattgtcctggctggcttaacattttcttcactgtcagttcatagccttccccaaaaagtatctctaaatgctcttttgataaatgaatgtgtcttgctgatatttcaatcaatatattctgccccacaattatatcctcctgacatactaaatgctcactttttgaagcggatccgtaagcgccttcatgggtggcagtattgtttcatattgtctcatgtcttctgacatcatattccggaaatgaatctggtcatcctccgcaaacggaaggtgacaaaaaataatctcttttgtccgtatggactgtgtaaacaccctgcgccccctgggaagatgcagaaaaagcggattggcaatcacagcgtcaaattccattgctcctgccatttgtttaaaaaacacggtgtcataatccgagtctcccaggatcaataccttttttccgtcagcctccagcacatagcaaaggtggctgaccgtctcatactccctgcccgcatgccttgagggaaaagctgtcaggcttcccgtctcccacagacgtatgctccggcactggcccatcggcagctcaatgacctctgtgctgcatacgcctgccttaagctttgaggatacgccattcggtgtatcctccggcatcaccagcatctcaggtgctgcctcctgcaaataccggtttaccaggtccaaatcaaaatgatcctcatgaaaatgggtaaaagccacccatctgactccgtcaaagggaggaatccttttcatgatctgctcccgtatacagggaggcacaggactgaacatcccgttctcctggctgtgcagaccgtccagcagcagcttccgccccccggactccaataacaagcccgcattggccaccagggtgatatggatcgttcccatcaggcgagactgcgcatctggtaccttcggtctgtttcatgacccgccctcacaaacgtcatgttttcagccccaaacgccctggttatctcatcctttttcccggaaagccattcctggtcaagattccggtaggatgcatggtccttccagaaataaagagacgtcacacggccgggattggtttcgctcacccaaatctgccacccgcaaaagccatccagcccagccagctcttttgccatgatttcatattctaattccacataacgttttaccagttccggcctgatttggaataccagttcctcgataaaaaggccgggttcgtttactctcagttccatgtgcgcgcctccttttcctgattacctgttttttaccggcggcatgtgaatggcttttcccaggagattggataccgcctcgtcaaaggcctctgaaagcgtggggtgcccgtgcatgacaccggctgcctcctccaccgtaaacattccgttcattgcaatagctgcctccgcaatcagatcgcttgcattggggccgatgatatgtacccctaacagcctggatttgtcttttgtggcaatcaccttcaccataccctcggcgtcccccatggtaagggccttgccgttgccggagaactggtatttgctggtaatatattcgattccctgctcctttgcctgttcttccgataacccgatgctggacacatccggaaaggtaaaaatggaattgggaatcaggctgtaatccacctctgtcttctctcctgccatgcgctcaacagctgccttgccctcctccgatgccacatgggccagcatgacgcgtcctgtcacgtctccgattgcgtagattcccggcacattggtctcataattttcgtctacctttattcctttgcggtcataccgcactcccgcgccatccaggttcaggccatccgcgtccatttcacgtccggttgacacaagaacctgcccgcaggaaagaacctgctttttgccgcctgcatccacctgcacagacagattgtttccttttttctcaatcttctcaaccttagatcctgtcatgattgaaataccgcgcttttccagcagactctttaatctggctgtgatttccacgtccacattcggaatgatgtggggcataaactccaccacggttacctttgcgccaaaggactggtaaatgccggcaaattcaatgccaatcactcctccgccgatgatcacgatctcctccggcaccgtcttcatatccagagcctctttgctggtaataacgccctccaggtccatcccctcaatgggaagcctggatgatttggaaccggatgcaatgagaatccgctttgtctccagccgctttacagtgccgtccttgccggtcacttccaccagaccggcttttatgattttagcgcagcccttctcaatggccaccttattggacttcagcagatattccactccgccggtcaacgtctttacaatcttgttcttgcgggcctgcacctgctccatatccagcctgtatccgtcaatctcaattccaaattccctgctgtggtccatatagcccattacctgggcatttttataaagcgcttttgtgggaatgcacccataattcagacaggtcccgccgcatgcgtccttttctgcaatcactaccttcattcccagctgcgcagccctgattgcggccacatatccgcccggtcctgcgccgattaccaccaaatccgtacctgccatagttcctcccatctgacactcactccgtatcagtacttatatcccgacaaatccgtctcatttgtaacaccgtaacgaattttctgacgggtaaatatgaaattgctttcatggattcccagtgtcagaaaatctgcgtggggatgatccatgtgcccgaattccgatgcatagcccggcgatttttggccgcccgcaaataccatggaataattgataaagtattcatccagcattccctgctgcagcaaatgggtgcagtaggacggcgcctcgatacagagcttttccagcccccatttcttaagggcatacatgagcacctttgtatcggggttctctccctggcccgtcactataaccgggaacgcgttaaaatctgtgtaaagctcacccaaatccgcatgatccacatcctcaattgtcttaaagggcccaattacaggatgcttcagcggggaattggccatcatgtattcggcgcccctgggggacgtggctatgaccagtttatactcttcctttgggtctacatcgaaaatataatggtcaaagggaatatccgtaccgtctaacgatacaatcacgccgcagggctggtacttcttcccaagcacttccctgcgctgcctggtcagacgttcctcatatacatggcaggtgatgcccggttcactgagcagggtgcgggcgcctatgatgattccgtccgcataggcccgcagtacattcagcacccagaaatcccccagggagccgtccgggtccagaaagttattttttgctatgagcggtccggagggattatccccataggccattttgccgtccgaagaaagcacgatggaggaaaatgtatatggcctgtctgaaggtgcttttggaaaataaatatccgtgtagtactgagccacatccggcatcaccgctgtctcggcagattctttccttatctgttccaaaatctcatcactttttttgacaatttgaatctttaaattctgttttggtatttcaaagaacactaattcgttcattcatttcctcctatagccccaggtttccaatcttcctgccccactgcgtgttgcccagccccacttcgtttatcagcttttcagccgccttctgggtggcatataatactttttcttcatcaatcatggtcatgcgcttgtgctccattacaaacacgccgtccaccatgacagactcaatatttgcctgactggaagaatatacaattgcgctgaccgggtcatgtaccggtatggaacggccgtggaaggggtcgtagattaccaggtccgccttcattcccgccgcgattgcccccagatccccctcccgcataactgcctttgcgcctcccagggttgccagttccagaaccctggaggccggcatggcggccgcgtctcttaaatgtaccttttggagcagggcggttgtctttaacacctccatcatatcctgggtatcgttgctggctgagccgtcgcaggcaaggctgactgtcagcccttcctttaccatcctctcaaccggagccacgccggaggcaagaatcatgttggacaccggattgtggctgaccttcacatcatactgtttgaagatgtcaaagtcctcctcttccatgcagacacagtgcaccgcgataaaatcaggtccgataaatcccaggcgttccagatggggtatggtccttcctccccttacttccctgcagtacttatcgtcatcctctgattccagcacatgcatggtaaggggaatatgcatctcatcggccattttgcgcatctcccggtagccgtcgtccgtgttgtcccagatgatgcccggcgccagggcaacgctcattctgctgtgcccttcatactttttgtacagacgcctcacatcgtcaaacatatcctgttccgtatcgtgatgggccaccttaaattccggcgggaaatttgcggtattggtgaagccccggccgtatatgccgcgtattccgatatcctccatggcctgggtcacataatcgctgagacccgggctggtatggcagtacatatagtccaatagggtggtggtacctgactgaatggcttccatacatccagtcagggcagcgtagtaacacatttccccgtcaaaccggtgcagggccgtacgcacggagctgtccagccagtcaaacaaaagtttatccctgcccaggccctttaacatggtctgaaacaaatgggagtgggtgcttatcatgcccggaaatacaaactttccctttgcgtcaaccaccctggaggcttcgtaacaggatgccagttccccgcctccaactgctgtaatcttgtctttatcaatcacaatgcatccattgctgattatgtttctgtcatgatccattgttatgatatatgcatttttaatcataacgtctgcttttttcatatggctttcctcctgttggcgcgcagatagcgggaatgaatatttaaggactttttaaacccatttaaaatcctgcaggctggctgtcacttctttcaggaatcttgccgccggcgctccgttgacaatgcggtggtcatgggtaaggctgaagttcatgacggatgcgggatagaagcctccgtcctttaccatcagcttctcgataatggctccaacgcctaaaattgctgattccggaacatttaatacaggggtaaaataggtgattccaaacatgcccaggttggtgatggtaatggtcgcgccgcccagctggtcggatgtaagcttattgtccttagcccgctgggtaaggtctgataattccaggcagattgtgcgcaaatccttcatatttgcatcgcggatcacaggcacaatcagaccgcccgggatatccaccgcaacgccgatgtgaatacggctgctgattttaatatgggtctcgtctgccatggtgcttctcagagccttgtggttctccaatgccatggccactgcctttatcagcatggcggtatagctcagcttcactcctgcattggtatattttccctttaactgtttgtataccctgaccagttccgttatttccgcctctgtggctatggtggcctgggcggttgtcagcagactgttctgcatggcttttgcgatcgcggtctccatggtgctcatcttgacaatgacatcctcgccttcacagggccgtgtgtcaaagactgccttaggcgctgcggccggggcagatgcggttgacggaccggatgccggggcggatgcagatgacggaccggatgcagatgacggaccggatgcagatgacgggactgacgccgatgccggagcagcggatacagaggcggcgcctgccgggtccttcctgggaattccatgtttcttcaaatctgaaattgtgattgcgcctaacaggccggttccctggatgtgggaatattcaagcccctgctcctctgctacctttttggcccgcggcgtgattttaatatcggccggggcggccttttccggggcaggggatgctgcatccgcctgctctgcgctgtccgcaaaagcgctatcttcactctggcctcccccgcactccgccgatatatcctcgtccgccgtgtccgccagaaccgctatggcctccccacaggcagcctcctccccttcgggaagcaggattttgcggagaatcccgtctttgggtgcttcgcacgtattggtgattttatctgttgttatttctgccagggcgctgccttttgtgacagaagccccttcttccaccagccaggagcccaggactcctgtctccattgacaatccgaatttgggcataattacttttgtaaccatatgtatttcctctcaatctccacttgtggctatatttaatattccatcaattcccggcaggtttttaccagatcatccagctgcggcagtacgtaatcctccagcaccggcgcgtatggtaccggggaatccagggaggtaacccgtttaatgggcgcgcataaatactcaaacacatcctcgcttatcatggcggaaagttcggctccccagcccccgcatttgggaccttcctgcgccagaatgatgcgtcctgtttttgccacggatttctggatcgtgtccttgtcataaggataaatggttctcgggtcaatgatttccacgctgaccccttcttttgccatgatgtccgccgccttatgggctttgtcaagcatgatttgggttgctacgattgtgatgtcgcttccctctctctccacctcagcctcgtacagaggaatctcatacatctcttgaggcacctctccctttacattataaagggtcttatgctctaaaaagagaaccgggttatcacttttaattgcggagatcagcattccctttgcctcataaggggtggtggggcatacgaccacaagtccgggggtgttcatgaaccaggattccacacatgcggagtgatggtaagcacaccggattcctccgccctgtacggcacgcaccgttataccgcagtgtgcctttccctgatacatgaagtttaactttgcggcgttgtttgtcagctggtcaaagcaaacccctaaaaagtctgcaaacatgatttccggtactggctttaacccgcacacagctgccccgcaggataaacccagaattgcggactccgataatgccgtatccttgatgcggttcggccatttctcccagattccctttgtgattccgaaatctccgcccatctttgctacatcttcgcctaatataaatactctttcatctgctcccatcatctgatgcagcgcttcattgattgccattccataagaaagttttctgcccattatcttaattccacctctctatcagcatatgtatatgttgttgcagtctcaattcccggatactcactctccagagagaatttaagcatctcctgcacatgtttttcttcttcctcttcaaccgcctggagcacagccggctcaacctgccccctctcaaggaggattgccttggtaagcttcaggggatccctgtcattgacccagtaagatacctcgtcctccgggcggtaagcggcgggatcgcctgcgaaatgtccctgccagcggtatgtcataaattccagtacagtggggccctcgccctttctggcgcggtccgcggccttttccactgcctcgatgactgcctcgatgtcatttccgtccaggcggaagctgggcacttcgtatccctcgccccatgtttttaactccttctggggatgggcttcctcgtagcgtgtggatatggcgtatccgttgtttaccagacagtagataatgggaagcttccaggtggccgccatattcatgctctcatggcaggttccctctcccagtgttccgtctccgaggaatactgccgtcacgtcatccgtcccattgtacacagaggcaaatgcggttcccagacaggtcaccatggtggagccctggattccgttaaatcccatgttcctgcactccaggtcattgacatgcatggagccgccccgtccgtggttgattcctgtctcctttgcaaatatctcagccatcactaatttggggtctgttccgcacagagcaatggctccgtgtcccctgtgatccgggaacttataatctgtctttttcagggcgtccaccacacctgcctgacacgcttcctggccaatggacagatgtacgaatccgggaatcgttccgtttgctgcatactcctcaattacctcctcaaatctgcggatcattaccatgtcccggtataccttcagaagccgttctttacttagtgccattttatttcctcctaatcctcttcttcgccattgcgtatttaaattaatataaaaatgacttttccaataccttgtaatttatttctcccccgcagaatgcctttcccgtattaatattgtgaatctgcacccttcccagggaatgtacatcgtgatcaacatagaagaagtctcttcccgctttctcaaacacatcctcaaataattgcccgtagcagggagacgaagtcttgcctaccagccccggaatcaccttctcaatggcctcgtctgatgcatccacccagatttccacgctgctgccgtagataagggcgtcattgatacggcccattgacttcatttcatccttaacaatgggggctatgggggcagttccccggatcatcacaatctgtcccgcgtcaaatcccttctcaaacattttgtggcaggtctgttccagcatcctgcccgacacctggatggaggcaaccacgcaggtactgtcggaaataaggatatacgtatcctccggcttaacgttacaggcctttgccacctccatggccatctggtccgtgggatacttcacatcctgcaggcacagcactgcctcgttattttcttccctgtaatccgtcatctcaaagtaccagtctgagtccacatgggcgatggacctggcagggccggaaccaatggttgcgaattccccgtcacccagtttccatcctgctatctgggatgccatgcaggcaataagaggcttgttgaccagcacttccaccgaagcaaaggtataatcctcgttaagcctgaattccccaagggtaaccgtgctcatatctcccatggaggcccttgtgaacagaacccctgccttccagcttccctcacagttaattcccatgtcaatgagggttgccccgcagtccattttgatcaccttacacccaagggcgtccgcgtcctctataatctcccgtactactttcattgcttttgcgttaatattcagcatgtatgatcctccgtgttttatttcatcctgcttatagttcaacctgcttataactcaacctgcttatgatttctttccaaacacatcaatggccgctcccataatcggggccgctgcgtccgatgccagaaatgtcaccacttccgccacatcctccacctggagcatggaatccaaatcaatggtcactgcctggtcgctgtccatccgttctcttgtatgctccgtattggtcattcccaggtatatggcattcacattgattccgtattgcttgacttcctcggacagcgtatgggtgaagcttacgattccgccttttgacgctgcgtacgcgccaaatccgggaaagaagtgtttggcggccgaggaactgatgttgatgatttttccgtaccggttccgtatcatggccggcaggactgcctttgtgcagaaaaaggttccgttgagattaatggaaatctggctcagccattcctcgtttgatgtctcaaccacgggaaccgacttgtgataggccgcattattgacaagcacatccacacttcccgcttcctgttcaatttccctgaagcactgctccacctgttcgggcaccgcgatgtcgcagactttcacaagggcccggccgccctctttcctgatttcctctgcaaccgcctgcagcttgcctccggtccttcctatcaggactgcgacagcgccctctttggcaaatgcctttgcaaaacccgcgcccagcccctggcccgcgcctgtgattgccgctactttatcttcaaatctcataaggtgattccatcccttctttcaactgtctcatgttcccgggccaggagttcaagcactgtatccggttttaatggcagacggtgcacctcacatccgattgcattggccacagcatttgcaattgccccggctgagggtaccaccgaacactccccgatgctctttgccccatatggcccggtgggttctgtctcctccaccagtcccaccttgataggcggcatctcaccggcattcataatatggtactgcttaaaggtagtgttttttacctttcccccgctgtcaattatgattccctctgagagtgcgtatccaagtcccatctgcaccgcgccttcgatctggccttccacagacatgggattgagcgccttccccacatcgtgcaccgccgtatattccaggacctttaccccgccggtccgggtatccaccgatacctttacaaaatgtgcgccgtaagacatggccagggcataggaggcaaatgtgtccgcacagcatatatccctctggttcactttccttgcgtgcgtgatgacttcctccagggaggccttcttttcaggattgttcctcacacaaaccccgttgtccttcagttccaggttctgctgttcctcttccagcagctgggccgcctctttcagcaattcctgcctgatttttcctgccgccttcacagcagcattgcagctcacatacgtacctctgctggaataatttcccaaatcatacatagtggtatctgtatctgcctgtatacactctatccggtccatgctgattcccagctcctgggccactgcctggacctgggttgtcacggagccattgcccatgtcgctgaccccggtgaacatgacaaccgaaccatcttcattcattttaagtatcacgccggttgtgtccggacacacgccgtacactccgtttccgtgggtggccgctgccattcccactccaatccggtacctgccctttgccgccccggattcttcctgttccttcaccgcctcctcccagccgaacagctccatcccctttttcacacagtcaatgggtcttgcatttccatgcctctgcccgttcctctggtcaaacccatccggttcaaccaggttttttaactgcatgtcaatgatgcttatatgtaagtctctggcaatcttattcatctggcactgctgggcaaagaactcctgtggagagccaaagcccctcatggcgcctgcaatgggcgtgttggtataaaccggagtggccctgaaccggatattaggcgtcttgtggtttttaaaaaacttaccgctcatggcccacacaatgctcatggtcccgcccgcatatgccccggcattgattatgacctgcatatcctgggatagaatggtcccgtcttttttaacaccggtcttaatctttatttccattccgtgtctggtcctggacgacacaatatcctcccgcctgttgtaaaccagcttgaccggccgccctgttttcatggccagcagggctgtcacaggctctgttattgtatctatttttcctccgaacccgccgcccatgccgggatttaccacgcgcaccctgctcatgggaagtccgaaaatcctgctgaggttcttcctgtatccgaacacatcctggctgggcgtatagaccgtcagcttgccgctgctgtcataaaccgcaatggatgcatgtgtctcaatggcgctgtggtggatggcaggtgtggaataggtatcttcatatatataatccgctgccttaaagcccgcttccacatcgccggcccccatatccaccggaaaaataatattgctttcaccgtgaatgggatacgcgccctccttcagggcctctccggggtcagtataaaagggaagttcctcatattccacctggattagcttcactgcctgttcggcaatctttaccgtatccgccgccacggccgccaccttatctcccacataccgaaccgtatcatcaaatacccgttccgtcttgtgaccgtcaatctcttctccgcagctgttatactttgtgtccggggcgtttaaatagcacaccactccgcggacgccctccagtgcctctgccctgcttgtatcaatcttctttattctggcatggggcacagggctgaacaatattttagcgtggagcattccggggaactccaggtcagccgtatatttgaactgcccggttaccttcatggccgcgtcgcggaccggtatgctctgtcctatgattcccattcagcgctcctccttctttcccccggcctttgcctccatcatccgccttgcggccagtctgattgcctccacaatcttcacgtatcccgtgcatctgcacaggttattggagatgccgttgttcctgatttcctcctctgtcggattctcaatccggtccagaagcgccttggctgacatcaccattcccggtgtgcagtatccgcattgtactgccccggcgtcgataaacgcctgctgaatgggatgcagctccgtgccgtttgaaaggccttctatggtctcaatcttctttccttccaggttccgtgcaagcaccagacaggaattcaccgcttctccgtcaatgatgactttgcaggccccgcagtctccggtgctgcatccgcactttgcgcctgtcaatcccaaaacctcccgcagcacgaatagcagggtccagtttttttctatgctgacttgtgttttctttccgtttatatccagacttacctgttccattgtctcactcccatgtgtttatattctgtcatctcccataatgcagccgaccacttcttcctttgttatggttccgaaatatggtcttatatctaattcttcaaaaacgcggctgacggcgtccctctcataaaccaccccgttcagcagctgttctatatctttcatctccatacatcccagaaagtcaccctcaaacctgatttgttcaatccgcgaattctttaaagatgccttaaccgttatgctgcctcccccaaaccgttttccgtgtgtcaggtctgccggcgggttctttccatacgtccagaggaaggattcatatttgtcacgggccaggcacataatctccctgcgctcgttctgggatatttcatattcctttccccctgattccccaaaaagggcctgcagcagtctttccctgaattccagaacatccatgtcataggaaagatgttccgctatggtggttacccttgaacgcaccgacttaataccctttgataccagcttatcctgctttacccgcaatgccctgctcagtatttctaaatctgaactgaataacagtgttccgtgaaacagtacccggttcttatagattcttaccgcgcttcctgatatcttggcgtctcccagaaccaggtcattgcgcccgttaatcccagcctggattcccattccccgaagcgcttctacaaccggttttaaaaaagcagagtagtctgtgtttgtaaaatccccatgctccatgataaagctgaaacacaagtttcccaagtcatggtagacagcgccgcccccgctggttcttctcaccacatcaattttgttggccttgacgaactcctcacatatctcttcatgggtattctgaaaagcgcctaccacaatggtgggacggttcctccacagcatgagtacgggctctctgatgtcctctttctttaaaaaatattcctcaaaagccagattttccgaaccgataatactgttcgtctccacgtatatcatagtaaaggccctctcatttccagctgttttcctaaaaaatatccacatggtgcaaggcgctccatgtggatatcctcttaaaataataagtatgctctttttactgcacggccggtatttccccttcaagctttacgtcggtcacttcatcctctgctgcctttggaagaatcatgtttaacacaagagcaaccagggccgtaccgggaatgccggtaaaaatggttgtaacggttgacggcagaaatgccaggttagccactccgaaattgccgccgatgccaatagccagcgcaatggccaggatggttgtgtttctctccgtaaaatcgcccatgctgataacccggagcccggacgccgatatctgaccgcacattacaaggacagctcctgccataacacagttgggaatcagcgcaagcagctgggccagctttggaaataccgcaaaagcaaggaaaatgattcctcccaaaccggtgacaaagcggcttcccacgccggtcattgcaacaatgcccacattcgcgcttcccgtaataaccggagcaccgttaaaggcagatgcaaacattcccgtgatacctccgcctcggatggtcctggataattcctccgaggtgggaagccggttggataccgccgtcacaagccccgtggtgtcccccaccatttccatcagggtgccgatgtgaaccgcgcagattgtcaggattgctcccacattgaagttgactccccatgcaaagggtttaaccatggaaaaccaggaagcctctccgatgcttgaaaaatccaccatgccaagggccgcggcaacaacgtatcctattaccatgccgattaatatacaacattgtttgataaggccttttccaaaaaagttcagaagaacaatcaccacaacgaccattacagcaatcgccaattcagtcatcgcggtttcactttccacattaaagtttccgaatgccgttgcgccgatacagatacccacggtcagcaccactgcccctgtgacggtagggctgaaatacttatgtaagtacctgattgcaatgggacccagaataaacaatacaccgcttccaaccagggccgccccaaaagctccgccgattccgatattggggttattggccgccaccaccattggtgtaatcagcgtaaagctgcctcctgatacaatggggagtctggctccaatatgctttccgattccaaaggactggataatggtagctataccggtgataaataacgcacactgaattaataaagcagtttctttgacactgagcccaaatcccatcgcaagcagcatacctaccgcaatctgtcctgtaaatgccgatagtacatgctggaatgccaatggaaacgctactgccaatcggggtttgtcttcgataccataactcatcattctcataactaactcctgtttctgatactcccgccatttctgcctaatgtatgaagttctccttttattttttatattcaaaacttttacctgacgaatcggcgccatgttttgtcaggaattggcagggcttccacaaaatacctgtctgtttatttgaaaaagacaaacacaagggcaaataaacattatgcggtatccttatggaaaccggtagtttgaatccgttccggcttagttatccaaattgagtcgttttgtcaaatcagccatctttgcacccagtgccctggctctctttaatccttccgggtcgtccatttcccctgacccgtcccccggattccagagactggctcctgcgtaagttcccgctcccccgttgcagacaaccataccctgtgtatggtaaaatccaaggattgcgttcagtgccccttcctgtcctccgtttcttgttcctcctactgcaatcgcagcgcccaccttccggttaaaaaatgtgggatccttttttataatattccaggtagggcggaaccggttgaaaaaggccgccagctgtgccgtaatattcatctcatagaccggtgatgctattatcatcccgtcagcctgatataccttttcatagagaggggtcatatcgtcctcatatactgtacaacggaccgcgtcctctctcagacacttattgcagtgaatgcagaagttcagcttccttgcacgcagttcaatgagctccacttccacgtcccctgtttccagtgcgccgtccagcgcttcccgcaatgcggcataggatgatttccttcttgggcttccacatattccgataatttttaccatgccgtgtactccttccggggcagaacatcattttattttatactctatttttacatgtatcttttttaacgcgcaaaattctcttgtgcaatatacacaattttgttatatgtttttgtttattattatgcgtttttcttaattatatcaaaaaaaaacggattgtcaacgaatccaaaccagtttccggatgaaactggttacatcagactttctatgccgtgggcggaatctatagcttgtctctatactcttttacattatttctggtggtttccctcagctttaattccaccggaaacaacacacttttactctctgtattgcccctcagtttttccagcagcagcctggccgcactttccccaagctggtaattgggtgcaaccacggttgacaacgaggggagcacaaagctggccaccggattgtcgtcgaatcccattatctccatatcctccggcacacgtatgccgtgaagcaccagatatctcattgccgcaattgccatcatatcgttaaaggcaaaaatagcggtgggcctctcctccagccgcatcaaatgcccgcacgcgtcatatgcatcctgcaaatctgcataatgggctttcaccatgcacagacggcagtcctttttttccatgaaaaagtcatataccgccttacggcgcctctccgtcaccaaataagtgtcagaagtgctgattaccccgaatacgcggttgccttcccggtacagatattctaacgccatctggacccctttgtaatcatcactgtaaacgtatgtcacatccttgggggattccgactgctccatattttcaatcaatacatagggcacctgaatcttggccatgcgcagctcctcgctgttaataaaaccggagccggatataatcattccgtcaacacttctctggtccaccctgcgccagaaatcctctatgctgtctgttgaaaatacaaggaccttataatccgcctccctcaatacagcctggcttccttccaccagctggttgaaaaattcattgcaaagggtcgggattacacataagatggtctttgtataaccggttgacaggcttttggcggaggggttgggtatgtagtccacccgcttcatgacccctatgatatgattgcgtgtttcctccgacaccttctccggctgattaatgcatctggaaaccgttgcaactgaaacccccgccaggtacgcaatttgtctgatattcaaaatataacctcctttttatgcattatctatacagtattatactatataaaggagtaaaacagataaaaaaacggagaaacctgttttacaggattccccgttttttatctgtgaaagtatccgatatatcatcccagccgttcaaatcccggaaccttaagtacatccgccattgtctttcccggcttcaactgttcctctaccctgagtccggtattggtgaatatagtgcgttccccgcttcttggcgcccctgttttcatgattggcaggcctaacgcaattgccaattcagcgtttgggtcgtcaatgactcctcccgcccttccggacgccacaaccagcaaatcatgttgtttcatgaaacggaccgtttcaattgcctctgtcagtgtaccaatctggttgggctttaatatcattccctgtatcgcgtccatgtcgattgctttcttggccctgtcaatgctggagcatataaaatcatctccgatcaatacagcctgtatctctttcctggcttttttgaatccctcaaagtcctcttcctgcagagcatcctcaataaacccgattggatatttatgcgcgatcctggaaagcagtgagatcatttcgtccctgtctatatacgttcccttatacagatatgcgtcccttgcctcatcatagatttcactggcagcgcaatccatggagaatataattttatcttcataccccaatgatgaggctgcttccataagcatatcaaacaatacaaacgggtcatccgatggggcgccatatccgctgtaattacccatcacgggcggttttccattgttgtatttcttaatgatatctcccatcttctggaatatctccaccccaattctggacccctcatagaatgtacttacatttttaggaatcacaataaactcctgaaatgcaagggtataattcccatatgtaccgccgttaatcatattatatgccggcgcaaataccctctccggctcttcctctgccaggtacctccataatggctttcccacgctggccgccgctgctctggcggccgcacaggaaacagaatagattgcatttcctcccagattcgtcttatatctggtcccgtccagctctatcatcctatggtcaactgcctgctggtctgtcacatccataccaaccaaagccggaccaatgatttcctcgatattttttactgctttaaaaacgctgaggccgccaaataactctttattgttatcccttaatacatacgattcattcttcccaacagacgtgccagtggatgctcccgcccttcccatcttaccattttccgtatatatttcagtctctaccacaggccttcccttagagtccagtacctgtcttgcctttacttcctttattctgtttccattcatcctattttcctcccttattccgcttccggtacatacatcacgttaaaatcgcacagattggtccctgtatttcctgtaagtatggaatcctgggtacactccagcgccccgccgcaatcgtgggttctgaatacgtcaaaaatattaatacccttttcagaaagcatccgcaatgtctgtgaatccgtcagtgctcccgcatacctggttgtcccatctgtgccctctgtatccaccgatgcaagggctgcgcccgcagtgtatctggcaccatgggcaaatcccaatgcaagctcatgggaaggacctcccgttcccctgcatccgtcctccactttcgtcgtggtctcccctgaacagaatacaaagcagggcgccttaatcggtctgtgattagcctgtatctcccttgccatggaggcaaagaagtatcctgcctcccggctttcaccttcgataaaggtggaaaataccatggagctgattcccatttccctggcagcttccactgcagcttcacatgaatccggtacattgttaaggcagaagtgcgtcacaccctctccaaatgcttttggggtctcatgctccggattatcttcatacagatattttaaaatagactctggcagcttgtcctccagctgataattcctgatacagtcccgcgcatcctgtatcgtagtcttatccggagccaccggtgtgccgaaaaactggaacggtgccttgaaatctacagtaggctttacccccacaccgtctcccacaattatatttacaatctcagcgccatttttaagtacctgctccgcaaggcgcccgccgttggttctggaaatatggcgtctgaccgcattgatttcctcaatcttcgcgccggagcgcagcagcatatcctgggcctgtatctcctcctgcaatgtgatgccctctttggggcatgtcagtaaagcggaactgcctccgctgatgacagagatgaacaggtcacccggctttcccttatcaatcatttgtattatatcttcagcggcccggtacccctcttcatttggaagggggtgtcctcccacatagaccctggtattgatataggtatcgttatcctctgctatcttcacggatataacaccttctgtcagcttctccttcaatacatcacatacggccatggccatggcattacacgcttttcccgcgccaaaaagatagatattgcccagtttatccatatcccagcgctttgtaccaatggtcagacgattaccgtccacagacataagttccttaatcagatggtatgcgtccacctttgcccacatgcgctccagcagttctgtaatctttttcctggattccctgtctccatgatttaaaagactctctgtattcttaattttccccattttgctgtcctccccttttattaaatagcagataattgacgattaacagaaccggcatgacatatgcctggaaacagtagggcgcatattggaaacaggatacccccaaaagatccagagcaatgacagcgttcatgttccatggaatcaacggccctaaaggggttacagagcaggccagatttctggttaaatctaaatcgcttacattcattttcttgtagagcggtttcatgaggtttcccgcaaaaagataggcaaaagaaccggaacaccccactgcatctcctaagaaacctgtaataatggttgttatgagaagctggaaacccgtctttactttattaacaatcggcgccaccacagcatccagaacaccggcctgggtcaatataccgataaggccgaatgtgatgagatacagggacgcactggaaaacaggctggtgactccgcctcttgacagcaatgtatccacaagttccatcccggtatcgctctttacacctgaccagaagcatgtcagcacataagccaatgattttccctggtaaatgacagctacgccaataccggtggcagcacttatcaggattgagatgatcgccgacttcttaagcaggagcagtatgattacgataagcgccggcaggaaggcaatcaatcccacattatagttatcacctaatgttttgattatcattagcgtggtctcattttggacctctccgcctgcgtatacaaatcctaaaatggtatataatacagcgcttatgatgaaggccggaaactgtatttttgccagatgcctgacatggtccatcaattttacccctgtgaccgcggatgccaaattagggctgtccgacatcggagaaaagccatctcccaggaacgcggcactgaccactgctccggctgtcatggccgggggaactcctagccccagtcccacggcagacatcgcaataccaatggtacctaatgtcccccaagaagtaccgcacgccattgcgtacaacgctccgacaataaacgtaaccagaagaaaaattttgggtgttatcatccgaagtcccacatctacaatcgcagacactgttcctgcggcaatccatgcgccaatcatacctcccacagacaacaggataaatacagatgtaatgatcttcccgcagtaagacactgccgccttttcaagttcctcgtatgtaaatcccagggacatgcaggccggaatgacaaacagccacgataaaaagaaggtggcggccatagataccccccatttcatataagggacaataaccacaacacaaacagcggccatgatcagtaacgcaaacaaaaagcttggtttctttcgttcatttgaactcatagattatctcctttctttttgctttcaatcaacagcgcgctttgtgattaaaagtattaaaagccaatgaaataattttggcttaatatctcttcaatttttgaaactacctctattccctcatccttattttttgcagctatgcttgaaataatatagtcaatgagaaaatggactgccacgtaggaatccttaaaggaggggcctacggcggaacacggaatgataatatctccatatggtttgacaggtcttatatccttgcctgtaatgattataactttagctccccttcttctcatgaaatgggctatatttaccgtttccttataaaatctcggaaaggagaatacagtgcacacatccccctcttccacatctgttatttcctcaggatatgtgctggcaatcccctgaatcagccggaccttcttctttatctgagacagcaccacagccaggtaaaaagcaggagaaaagcatgtcctaagtcccaacacataattatgatttgcactgctaatccagtctaccgccaaatccagcttttctgtgtcctgaagccttaatgtggcctcgatattattcacggcaatgtccctgcaccgaagaagcaaatcattgggagtccctccctgttcagataactcgccaaacctggaaggaaggcttacctttacttttatcaaatcctgtatgtttttcttcagatccgtatagtccttataccccatcgtcctggagaaacggattaaggacgtggtgctgagtccgattctatgtgctatttcatttaatgtttcaaatggtacaagagcataattctccagcagaaaatcagcaattattttctgtgatttagtaagattttcatatcttttgttgatttcatcaataatatttttcatctctcatctcctgattttgagtatatcatagtacattttttcttcaataccgcacatattttctggttagtttatctaatttccctcatattttttaactccaaaacagctccccctcgtatttttcaacaatttatcaattcattttaaaaaccgtacacagctgacaaagaaatttgacataaaaatgtatatttatatacatttttaaaaaataaaatatcccggcatcataccgggatatcaaacacaaaaaaaatcccctctccgtacccggaaaggggaaaagggtgagtagagggattcgaaccctcggcctccagagccacaatctggcgcgataaccaacttcgccatacccaccatattaagttatgaaacatcagagcttacgctcaatgagcctgaagggattcgaacccccgacccacggcttagaaggccgttgctctatccaactgagctacagactcacaacttctgacagccttgatgtgactctgcactttcatgccgactgctgtcaacgagctatagtttatcatatgtctctggagattgcaagcactttttttaaatttcttgtccttttttgcactttttttgcagccttttccaaattccttattccggagcctgaaaaaggctgcgccaaggctgtgacaaagccatcgtctgccgcagaatatgccgttgaatgtaccgttgaatgtaccgttgaatcttccgttgaatctaccgcagctgccggtaaaaccggagccgtttattgtccccgtccatacggcacatggtgccaaagggcagggtacccatgggcttgtcgtggcctgacctgatatgatacatcacaggcaaatcaaaggttccaaagcggtcatgaaggaattcctctatctgataggtgccgtcataccggtcattggtacagtccgtaaaatctcccaggagaattcccgcagcgtgttcaaacatccccgcatactccatctgggtaatatacatgtcaagggaggcaatgccttcctccacatcctccagaaacagaatcttatccctggtgtccagctgatagaaggtgccgcaggccctggccagcacagatatatttccgcccgccagaatgccctctgcctcccctccccggatggtcttaaagccctcctcaccgggcgggttacgaaactccagctcctcctccatattgagggccgcaaacagaccggacctggtgtaggcgtcaaagtccttcagcatgttggagcacaccatgggaccatggaaggtaaccagattcccaaacatctggaatgctgagtgaaggtttgttatgtcgctgtatccaacaaaaatcttgggattttgcttcaccaggtcaaaatccaggtatttcatgatttgggagctgccatatcctccccgcacacagaaaaccgccttcacctgcggatccgcaaacatgcggtttatgtcctctccccgggccccggcatcccctgccagataattgtggaaattatacatgttctcaagacatgtgcccagctttacccggtaccccatgccctccagcagctttacgcagccgtccctctcctcttcctttacaggaaacgctggagacaccagccccactgtgtccccttccctaagtctctccggaaataccatctgtctcaatccgtcctttcatccttaatccggaatataccggaaaactgttttccggcgcgctccggccaaaaagctgcccactcctgattcccaggcgtgggcacctcttactctgcttacttactctgcttacttcctttgcttactcactatggcctggctctctcaccatgcctactgcttatcagcatatttaaatatcgtatgtccaatataagtcttgataacgccctcgcatcccggcttcaccagaagctgtgcattgcggtagtacagaggcagtatgggcatctcctccatcagaagcttctcgcctgcctcaaacagctccatgcgcttcttgttgtccgtaaggctcctggcctctttcatcatgctgtcgtattccttggcctggtcgttgagccagcggcactgggtttcatttctctggagaaggaagcagtccagattggtgctggggtcaggataatcgccggtccagccgtcatagcagatatcaaaattgccggctgtctgctcatcccagtatacctttggctcaaaggtaacaatctccacattcactcccagattttccttccacatagcctgcatggcctgggccacgtcttttttctcctggtcgttctgggtaatcagagtcagagtagggtatccctctccgcccggatatcctgcttcttccataagcgcctttgcagcctccacatcctctgtgaacaggttgcccaccgtggtgcggtaatcttcgctggagccctcatagggaatgccgtgaggcacaaaagcataggatgattccggcctggaggcaacgatggactggttgatgacgtccctgttaagagacattgccagcgccttcctcacccgcgcgtccgacaggtagtctttctcgcagttaaagtcataatagcaggtacctatcagatcataggacttaagctcgtcgcttccgccgtactgtgactgtgcctgggtctggatgatggtattgtccactacatccacctctcctgcattgtaagcggacagcgctgcctctgcggattcgataaacacaatattcacgccgtccagcttcactgtatctgcgtcaatgtattccggattcttctccagcacatagctggcctggggattgatttccttcagccggaatgctccgttgcttacataggtgtccgctgacttggtccaggcctccggtccttccaccgcatccttcttcaccgggaaataagcggtgacagctgtaaggtcgataaagtaggctgtggggttctccaaagtgaccttcagtgtcttgtcgtcctcagccttgacgcccacatcctcggcagatgcctttccctcattatatgcctcgccgttcttcagatagaacagataccaggcgccgggagaggccgtatcctgggccagggtacgcttccaggcgtactcaaagtcaccggccgtcagaggggagccgtctgaccatttaaggccgtccctcagggtaaaggtgtattccagtccgtccccgctcacctcgtacttttcagcacatccattgatcaggccgccgtccgggccaatctgcatcaggccggtaaacagattctgaagaacaatggatgatgtggcataattgttcatggtggggtccagtgtctcaggctccttctgcatggcgtaggtcatgacctttccgccctcgctgccggctccgtcttccttcccggccgaagcctgggtggtctgccccgaagcaccgttctcagccggtttctcagaactctgtccgccgcaccctgccagcatggcagcagccatgacaagactcagtaatacttttacattctttctcattttactcctccttcttatgagcacccagcaggcgttttccggcccctaagcgcgatatatgccaccggcgcccagtcaactgaatacctgaccgccggaaccgtcacatgattctgtacccgtgattctgtacccgtgattctgtacctgtgattctgtacccgtgattctggccctgtgattctgctcttgtgaatccggccccatccggctaatcaaaaagatggcaggccaccttatgcttgtcattgaccgcctttaactccggcttaacctggccgcagatatcctttgcgtaacggcacctgcttcggaagggacagccgggagccggattaatgggcgagggaacatctccttccaggatgattctctggttttccttagccagctttgggtccgccacaggcactgcggaaatcagggactgggtataggggtggagcatgttgtcatacagctcatccacctgggcgtactcaatgagattgcccaggtacataacccccacctctgacgagatatggcgcaccatggacaaatcatgggaaatgaacagataggtaaaatgaaacttatcctgcagctcctccagtatattgataacctgggcctggatggatacatccagggccgatataggctcatcgcagacaataaattccggctccgcagccaaagccctggctatgccgattctctgcctctgtccgcctgaaaactcatggggataccggttgatatggtccggtttcaggccgaccatctcgatcagctccctgacacggtcattcttatccttccccgtgtgcagcttcatggcccatattggctcggctataatgtcgcctatgttcttccttgggtccagggaggtataagggtcctggaatatcatctgcattttcttcctgtagggaaccatctggctgtcgctcagtccggtgatgtccgttccctgatacagaatccgtcccgcagttgcctggtacagcttaaggatggtgcggcccaccgtggttttgccgcagcctgattcccccaccaatcccatggtgcggcccttctcaatggagaaagttacgccgtccactgcctttaacacctttggcttggaaaaaaggccgcttttcagcataaaatgcatcttcaagtcatttacttcaatacagttattggtatcagtacattgagccatcacagcttcacctcccccatccgggctttcaccgattcattgtgaagccagcaggcgctgacatgtccgtttcccaggtcgcaaaagggcggctgatggacggcgcagagcttcatggcccgggaacaccgggccgcaaagggacatccctttggaggattcaaaaggtcgggcggcgtgccgaagattggcaccagcttttcctttgtcctctttggtatggaggccagaagtcctgccgtgtagggatggccggtccggtagaagatatcctcgatcttcccctcctccatgattaatcccccatacatgacaataaccctggtgcacaggctggatataacccccaggtcatgtgtaatcaatatgacggaggtgttaaactcattcttcatatgggccatcagttccagaatctgggcctgtatggtcacatccagtgcagtggtaggctcgtctgctattagaagctccggcttacagcacatggctatggctatcataaccctctggcgcataccgcctgagagctcatggggatactgcttcagcctgcgctccgggctgggaaggcccactgcctccagcataaccagggcctttttctctgcttccttcctggaaagcttctggtggcgcatcaggggaccgcgaatctgttcccctactgtaaacaggggattcagactggtcatgggatcctggaatatcatgccaatccggttaccctgtatcttcctcatttccctgggagactttttaagcaagtcctcaccatcaaagagcagggcgtccgcctgccgggaagcattgtcctccagcagccccataattgacaacatggtcacactttttccgcagccggattcccccacgattcccaggctctctcccttccccacatggaaggtaatgccccttacggactgcacgctgcctgcgtctgtggcaaaactggtgcgcaggttctctacctctaatattgtatcttccatcatgttcatccacctacttcttaagtcttgggtccagagcatcccgcagcccgtcaccgataaagttcagggcaaatatggtgatgctgattgccagcgccggaaacagcatctggtaaggatatgaaaacagatattctatggcgtcattggccagggttccccagctggccttgggcacctggataccgatgcctaaaaagcttaaaaacgcctcctggaatatggctgaaggaatcagaaacgtaaccgtcacgatgatggaacccatgctgttgggtatcagatggtgtatcagaatctgccatttgctcagcccgcagaccttggctgccagggcaaaatcctgttccctcagggtcagtatctgggcacggaccattctggccgtggtaatccagtaagtgagacacatggcaatcagaatactctgtatggtgttacccagaaacatcataatcaaaatcatataaatcagactgggaataccggtcaggatatccaccacacgcatcatgataatatccgtggttcctcccacataacctgatattcccccgtagagcacgcctatgaccatgttgatggccgctgccgcaaatccgatggacaggctgatacgggccccgtacatggtcctgacaaaaatatcacgtcccatcttgtctgtcccgaacaagtgggcgctgttgggccactgaagggcatttccaaagtctgtctggtcatatgtataaggggaaaacataggtacaaatatggctgccaatgtcataagcaccacaatggcaatgcccagcatggccagcttatccttcttaagccgtatccagcagttcctccagtaggagatgctggggcggttaatggattccatctcccggtctgtgtcggaaagtcccgccaggagttcctcgggaatcacatccgacatggtaaattcaactctctcttccatcctcttcacctactccgttatctttactcttgggtcaatcactgcgtacatgatgtcaacaatcagattacagccaataatcatcacgcctaagaacacggtaagtcccagtgtaacagaatagtccctgtccgtgatggcggatatgaaatagcgtcccagtcccgggatgctgaacagcttttcaatgatgaacgtaccggtgagcagcgtggccaccagcgggcccacataggttaccaccggaagaatggagttcttaagggcatacttgctgatgacctcccattccggcacgcccttggagcgctctgtccttatgtaatcctggcgcatggtttccagcatgctggaacgcatgagacgggtgatataggccacctgggaaaatgccatacagaacaccggcagcacatagtgcttccacgaagtcaggccataagagggaaatatcttccacttctcacagaatacgtacatcatcagcacacagagcacaaagctgggcactgacacgccgatggtggccagcaccatggaggcgccgtccgccagctttccccgcttcacggctgccacgattcccagggggattcccgccgcaagggccaccgcaattcccagcgcccccacctttgccgataccggaaagccgttggctataagttcattgaccgtggtatcctgttttttaaaggaagtccccatatccccatgaaggagattgtcgagatatctgacatactgggccggaagcgggtcattgagaccatatttttcggaaatctgctccaggattttttccggcacgttcctctgttcagacggactgaaaggacctcccggaatgacatgcatcagaaagaatgtaatggtaataagaataaatagagataacacgcctgctaccaaccgcttgattatgtactttgccattgccataccacctttatcttagataagctgaaatcgggctgaaccgccctgtgtataaaaaaaaggcgacttaaagaacagtaagttcactgcaccttcgcccgacgtacttaattaaaaattatacctactggccggttaaaagtcaataaaaaggacacagtttcacattgcattttctggcagaaatacctataattaaatttgcggctgccggcctgcgggaccggatgaggttttacccctgttttcagccgcaagatggaaagaaggtatgaatcacatggaaatccctgttctgaatgagataatgagagatacggtggtggaggtggatctggaccgcatcgcctttaatgtaagacagattaaggctatggccggtcccggcacccaggtggcggcagtggtgaaggcggacggctacggccacggcgccctgggcattgcgcctgccatcatggaaaacggagccagcctgctggcagtggccaccctgtccgaggcagtggagttaaaacaggcctatccaggctatcccgtgttaatcatgggactgacaccggaccgtctgctgccctatgtgctggaatacggcatcatccagaccattgataccctggcccaggccaggctccttaaccgcctggcttccgaaaaaaagcagcaggctgtcatacatatcaaatacgacaccggttttcaccgcatcggattcccggactgtccggaaagcctggatgaaatacggcaaatctgctctatgccctggctgaaaccggagggcatctactcccatctggccctgaaggacgaccagtccaaccaggtccagttccggtgtttcatggatgctgtcaatgaactggagggcgaaggctgccatttccgctataaacatattgcggacagcattgccgctgttgattttccggaatacaggctggacatgatacgggccggagccattgtatacgggttaaagggctttcacaagggacagcttgacatccgccaggccctgacctttaaaacccgtatcagccacatcactcctgttctgaaaggccagggggtaagctacgattacctatggaccgcgccgcaggacaccagggtggctgccctgccctttggctacgcggacggctatccccggaacctgcgtggcaaggccacggtcaccctcaggggaaaacaggtcccggtgatcggagtcatatgcatggaccagtgcatgattgacctgaccgatgtgccggaggcacagataggggaccaggtcatcatatacggggacggcagcggaaacacgctggacatcgacgcggtcagccgtctggcaggcaccaataaaaacgaaatcgtggcccggctcaccagacggccccccaggatctatgtgaggggaaatgattccgggaccggatacagctctgcagaaaggatgacaccatgaatataaaacaacggacagaagaattatttccccagctggtacggatccgcagggaactgcaccagcatcccgaaccgggttttaaggagcactggaccagcgcctatatctgcggccttctggatgagtggggcatttcctacgaattccctgtggcgggcacgggaatcgtggccatgatccagggagagaagcccggctccggcaatacggtggcgcttcgggccgacatggacgccctgcctctgacagaggatattgcccgtcccttctgctccctgcatcccggccatatgcatgcctgcggccatgacgcccatgtggccattgcccttggcacggcccgcatattgatggaatcccagagtgaatggtccgggtgtgtgaagttctttttccagcccgcggaggagaccacgggaggcgcccttcccatggtggaggcaggctgcatggaatccccccatgtggactacgtaaccggcctccatgtaatgcctacccacgaaacaggagaaattgaaatccgctacggggatttaaatgcctcctccgatgagattcacataaaggtccatggaaagagctgccacggcgcctatcctgatacgggagtggatgccattgtcatggctgctgctgtcataaacagcctgcagaccctggtaagccgctgcatctcacccctggacagcgcagtcctcaccctggggaccatacacggcggaaccgcgggcaacatcgtggcagccgagacagagatgaccggcaccctgcgcaccacggaccctgccgtgagagagaaaatcattgacgccatgacccgtcaggtaagctgtacctgccaggccatgggaggcagcggggaggttgtcattgtcccgggatatgccgccctcataaactcagacgaaatcgtggatgtgctggtggagacagccgaagaggtccttggaagccaacacatccatccaaagaaattccccagtctgggggtggaagacttttcatttttcctggaaaaggcaaagggagttttctatcatctgggatgcgccaacagggaaaaaggcattacagccccccttcacagccaggacttcgatatcgacgaagaatgtcttaagctgggagtgcagctgcaggcccaactggccctgaaacttttaaaacgtgatattgcttagaaaaaccagaatacaggaggaataaaattatgaaggtttatatcagtgtggactttgagggggtggctggctccacttcctggagctccaccaacttaggtgatttggaacacggtcccatggccagggaaatgaccctggaggcagccgcggcatgcaggggagccctggcagccggagcaacagaaatctacataaaggatgcccatgaatccggcagaaacatggatatctcccttcttccaaaggaagcaaaaatcatattgggctggaaatactcccctgattccatggtctgcggtctggaccagagctttgacgccctcatgttcgtgggataccactctcctgccggtaccaacggcagccccctggcccacaccatgaaccgcaagaccaattacattaaattcaacggcaaactggcttcggaattcctcatgcacgcctatgtgggcgcatccctgggcgttccctcggtattcatcagcggcgacaaaaatctttgcagccatgtccatgaatacgatcccggcatcacggcggtggcagtgaaggaaggcatgggcgcagccaccgtcaacctggcgccggagatggcccaggagcttattgaggaaggcgcgaagaatgcccttctcacaaaggatgcctgccatctggaggtgcctgaaaccattgtcatggaaatcaacttcaaagaccatttccaggccctgagggcttcctattatcctggaatggtgatgaccgatgattttacggtttcctataccgcccgttccatcaatgaattgatgacagccaggatgtttgtgctgtaagcgggaaaggactgttcataataataaggacaccagatagcttacattatctggtgtcctgtatttttatacacgtattattatacactcttctgcttccggttcctggcaaacatgaccgcgtactccagggaattcttcaggctcagctcgctggctgttccggttcccgcctggtcaaaggccgttccatggtccacagacacacggataatgggaagccccagggtgatgttgacgccggccaccgcgtcccaggcctgcttttcctggtcatagacaaagcccaccaccttaagggggatgtgtccctggtcatgatacatggccaccacgatgtcataccagccgcctctggctttggagaacacggtatccgggggcacagggccctctgcccggattccctctgccctggcagcctcaatggccgggatgatctcctggatttcctcctgcccgaacagaccgtgctcaccgctgtggggattcagccctgcaactgcaatcctgggattctcaattcccatctccctgcacgccttatccccaatgcggattacatccagcacccgctgcttcttaacccggtcgcaggcctcccgcagggacacatgggtggacacatggaccacccgcatgttctcatgggccagcatcatggtatagtttttggttccggtcaaatcagcataaatctccgtgtggccggaatagtgatggcctgccaggttcacggcctccttattaaaggcattggtgaccgtggcatccacctgtccgtccatggcaagttcaattaccttctccacataccggaacgcagcgtccccgcacatggcggacacctgcccccgcaccagctcatccatggaaaccagacccatgtccagcacgtctatggtcccgtgggtaaagacagcatccctcacatcctttacggcccggaccttcatctcctcatggcccgcgattttcagcgcggcttccaggacacaggcatctcccacaacaatgggcctgcatgcttcatatatggattggtcggccagagccttcacggtaatctcaggtcctatactggccggatcacccatggtaatacctattatttttctatcttccacgcttacgcacctctactttatgcagataagaaacaaatatgggacaaaggatagctgtcacaatgatggcagcggtaatctgtgcagtggccgcttccgctaccgctaaaagggtggcgtccacagctgctaccgatgccggtgtggcggcagcattgccggctgtggttccaatggctccgcccacttccggatactccatgcgcagcagcttataaatcagatagccgcccaaaccggtaatcagggtacaggcaacgcccagaaggattccggggcctcctgcttttaacaggttcatgatgttcagtcccgctcccagaggaaatgcaaagaaaggaatcagcatagtggctccgggctcacagaacttgcggatatcttcgtccaggttgcccagtatgcatcccacgataacagggacaatacagcctatcagaatagacatgggaatcttggcaacaccggccgctcccagggcaaccatggtaaagaaggggccgtcattgatggaaagaatggataccgcgcctacgtcggtcgcatcgccgtactctccggccagggcagcgtacagtccgccgttggagttggccagagcgcctacaatagccagggtagaaagtcccaaaaatcccttttccccaaaaagagtaccgcaaatcagtccgataataatgccgattccaacctttaccgccgtgatgaccacgcctttatatatcgtaacgccggccttcttaaaattaatggtagtggcgttgcagaaaataaaaacagccaggatgggcatggcccctgatttccacagatatgtggtgaaggttccgtcaaacgcgctccacaaaacatttccgaaaaaggtgttgacaattgctcccagaagcagcggcactaccatcaaacctcccggaatcttcttaactgcctgtaaaatcttcatacttaatgttccccctgtccggcttttataagcctgataatattgtctgccgtataagccaggttctcctggctgcggtgtctgctgacggaaaaatcctgaggaagcctgttaatggggaacaccgctgtcacacccatatcgtaggcctttccaatctcgtcgtcatctgctccgcctaccaccgcaatcacggatttggcctgttttttagccctctctgcaattccaatcactaccttgccccgcaggctctgggaatccagcttaccctcgcctgtaagaatgtagtccgcgtcgcctatgatttcatcaaaccgcaccgtatccagcacggtctgaatccccatctgaagtctggatccaaagaacgcaatcatgcctgcgcccatggctccggccgcccctgttcccggcacctggctaatatcggttcccgttgcctgggcaatgaccctgctcagattcctgattccctcatccagctgaaggaccatggcctcatccgctcccttttggggtccgaagataaaggacgctcctacaggtccgtacatgggattgtcgatatcgcacatggtgacgatctccacctgctccagaaggctgtcccttccggacaggtcgattctgtcaatatcggcagttgttccgccggtgggaatgaactgcctgccgtccctgtcataaaacctaatgccaaccgcggccgcagcgccgcagcctccgtcgttggtggatgagccccccaggcccacaatgattttcttcacgcctttacgggctgcggccagaatcagctgtcccaccccataggtggtggtaagccttggatccttcctgtcctccaccaggggaagcccggcgcaggaagccatctcgataacagctgtctgtcctgcgtctatcagtccgaaataagattccatgtcctcaaaatagggattcttaaccgtgacatactccttaacaccgcccactgccgtgataaaggcatccacggatccctcgcccccgtctgccaccggtatggagacggtcaggctgtcaggaaaatgcttttttatcttctcatccatcactgcgcaaatctggctggagcttaaggtccccttgaatgaatcaggtattaaaataaacttcaaatccgtatcccccctcttatcctcttacgataacagacacaccgtccggtattaccgttactttgtaatcttccttattcaccattgcctttgccttgttaagggcctcctccatggtgtgggccggaatcatgtgaagctcctccaccagtttatcatcgcaggaagatacaaacacaatcctggcttttaacatgacccttgcaaaaatctgcgactgccactggtctatgatggtttcctccggtttccggtccataaaggtcttcatcatacggtttaaatccttttcatcccggaaggtctcatggaaatatttgccgccgtggccgtccgctgccttggaaagcataatgataacgccgccctccttcaccgtcacctctgctgccgtcatgccctttacggactggtaaatgttctggtccagaggatagcccccgtttgtggatattacgatatctgcgggaacagcatccacctgacacttggaagccaggaaatccctgcccgcacgatgggccagatcacagtcccctgccactgcaaagatggggtcatgggcggaatcaatcaccacattgacgataaagtccagacccgccaccctggctgcgtacagcatgtcattgtggatggggttgccctcgatgataccggtccttgaatgcagatcgtcaataaaagctgagttgtggttatacataaccgtctcacggctggccacgcccggaagcacgctttttctgccgcctgagaatccggcaaagaaatgaggctcaataaacccttccgcaaccagcaggtccgcttccactgccagcctgttaatgtacatatttccgcctgaaggcagcttgcccagataaaccatgttgtccgtgtcatcacagtcatggactataatggtttcatgttccgtaatctcagggccgaactttgactccagttcctccctggtcgtctccctgtgaagtcctgtggaaataagaatggtaatatcagcatccggattgcccctgcggatttccttcagaatgagaggcatgataatgcggctgggcacaggccttgtgtggtcagacgaaatcaccacaacctttttcttgtcaatggccatatcacatagcctgggagtcccgatgggatgctccagcgcctcctgcaccagctgggttccctccatgggtgccttgtaatcatggagttctgatacaagcacaccggccaggtgctcctcttcaatttccgctttcagtgtttcctttccataaggcagtaaaaattctctcatgggttatattcctcctctttcttttattttcctcatggcaaacgccgcagcatcctctgtgccgaaagctcctgcctttgttaccagtttaagtccctcataggccccgcccttaacccttaccagcgggacgcccaccaggatttcagccagtatctcggaaccgtccgccccgatgttcatgagcatacccagggccgtatccccgccggtgagatatacccccgatacctcaaccgagtccagcacctctttggccatcctgcctatgagtgagcgcacataatcccccacctcagtcaaatccatcccgcttttctctcccacttcctgggaaagctcaatcagttcccggtcataagccgtatctgtaagaaggatggtatctctcccgctctttaaatattccacagccatgtcgcggtattcctcaggccgggctgttcccgtcatgagctgggccacaggtaccttgaccatggcgtatccggccctttcacagtaatgcatctgttcattggccaccgaactgatgctggccaccacgccaaaggacggaagggtgggcttttccagttccatcatgttgtctgccattcccgccgtccccacatacagggtccgccgcccgtcctgcctgactgccgcaatgatccgtttcaggtcatcatccgactcagcgtcgcatacaaagatccggcccccgtcaagggaaaaggactggcttcttacgtccggcaggtattttaacagcaccggttcctcataaacctgccccagcagctttaccaggttatcttccattaccggattcttggggtccttggataattctgtcttacagatttccacaccgtttaaacactgcaccccgtccatagtggtcctgcccaaggcgggaagggccggggcaaacaccacaagctccgggcaaaaagcatcatccactgcctttatttcctgggcaatatttcctctcatagtggaatccactttctttattatgtagcggaactgtccgaaatccacctgttctaatgaatgacgcacgatttcataggcatggccgggcaaggcattcctgctctccgtatcaatcacaattgatttttgtgaatccaccggttttcccgcaaacaggacttccgtcggatatcctctcctctttaactgcactcccgtatcatttgcccctgtaaaatcatccgcaataatcagatatctctcttccattggctcccaactttcctttatcgttcacttttgaaacatattagtttcctctatcagctccatagtttattgtaatataggggggcttttcaattcaaggaaaatgttgtataatatgtttaaaattgcaacattcggaagctgtattttccagaggaggcagaatgggtgaaaaagtcaggatacttggaattgctccctataagggattggtaacattaatgaaacggtacgcaggccaaagggatgatatccagctgacagccatgctgggcaatgtggaaacaggactttccctggcaaaggaacattacaggaactatgatatcatcatctcaagggccaataccgccagccgcattgcgaaaggcgtgcccatccctgtgattgacattggaattgattattatgacgttcttctctgcctgaaaacagcggagaatacaaaaacaaaatttgcggtcctgggattccgttccctgaccaccattgcaaaaagcatatgtaatgttcttaagatacctacagatatattttccatcaacaccacgtccgaagccaactcccttctggacaaactaaaggagcagggttacaagaccgtcatttgcgatacggtgccctacaactatgccaagctgatcggcataacccctatccttctcacctccagcatggaaagcctgaaagccgctgttgaccaggcagtctatacctggcagacccacagggatttataccactccctgtcccttatgcaccagctcttagacagcagcgccaaccgcttcctggtgctgtcccggacaggcgaatgcatctacaccacgctggaggatgagatcgcggtccccatacaggcaaagctccagaatgaactggagcaatgctgcaccggacggaagcgttccttctttattacagtaaacaaccagatgtactccatcacctcccatctggtggatgagacccagagcccctacatcatcttccatatcatgcgctccgagattcccctggcctactcaaaatacggggtgaccatcatggacaagcaggctgcggagaacagctttatggacagcttttacagcaatacggagctggccagagaaatccttaccaataccgaggatgcggctccgtctccgtcccctctgagccttatgataacaggggaaaccggcacaggaaaggaccgggtggctcatatctactatgcaaagagccccttgtgtgacaacccgctctacgtcatcaactgctctcttatcagcgataaaagctgggacttcatcaccaaacattacaactcgccctttacggacaacggaaataccatctacatttccaacctggactcattacaaaagcccaagcagaagcagctgctctccatcatactggacaccaacatgcatgtgcgcaaccatctgatattttcctgcacccagaccgcgggaagcgccaccccccacgtggtctttgaatacaccaatgccctggggtgcattctggtgcctatcaaaccactgagggaacaaaaggaggacatcatctcatctgccggtctctatatcaataccctgaaccaggaactggggcggcaggtggtgggggttgacgatgaagcggccgcgctcttggagcaatacgagtacccttacaacagaacccagttcaagcggatattaaaggaggccgtcatacggacagacggcccctacatctgcgcaaaaaccatacaggaagtaatccagagggaaaatgttctgttttccggatttccgttcccggtccatgcatgctccggttccaccaaagaggacgcggatgccgttccgggaaacttcaggctggcggtttcccatccctccccattctgcctggataccagccagtctctggatgagatgaaccgggatatcgtgcactatgtcctgaatgcctgcaaaggcaaccagaccgcagcagcaaaaaagctgggtatcagcaggactaccttgtggcggtatctgaaccggtaaaactgcaccattacagagcttcctttttattttatctctgttataataaaaccagatgaaaagacaggagtaaggagccatgacggaaagagaaaaaatgctggcaggacagctctatgactgcggcgatgcagaattattaacacagtggcacagagcaaaggatttggtaagggattataacagcacggattccgcggatacactgaaaaagaatcagatcttaaatgagctgttaggcggaaggggggaagccctttggatcaccgcgccgttctttgcggactacggcaacaatatttattttggaaacaactgtgaagtcaatatgaactgcacatttttagatgataatgtgatacgtatcgggaacaatgcgctcattgcccctaatgtgcagatatatacggcctttcatcccacaaatgcaatggaccggtttggagtaccgcagcaggacggttcctttgcgttctgcaggacacagacagctcctgttgtgattggggacaatgtttggattggcggaggcgccattattatgccgggtgtcaccattggtgacaacgtggtgatcggggcagggagtgtggttacaaaagatattcccagtaataccgttgcatacggaaatccctgccgggtcagaagggaaaacagataaccttctgcatgaaacaaattccgggggcattaaaccaacaggacgccggacagtaagattgtccggcgccctgtattttatattctgtattttatattctgcattttatattctgtattttatattctgcattttatgtcatatttccatgtcacctgtcagtggtttgcccccacttcaatcacaggctctcccggaccggttatccattccgcgccgtcctctgtcaccagcacctcatcctccatccgaaaggacagataaatggactccactcccttttccaggtcatagggatacactccgttttccacggcaaacaccatgcctggcttcagtttttcattggcttcatcgtgtatggtgggatactccaccacgttgaggccgatgcagtgtccgctggagtgaagcagaaatttcccaaatctggaatcccggatgtatccctcgcagatgcggttgatctcagcgatagaaacccccggcttcatggcctcctttgccgccgccacacagccgctggccgtcattgccatttcccgttcctcccgtggcacggttcccagatagaacacccgggtaaggtcggacgcatacccgtcaatgtggccgctgatatccaccagaacatactcacctttctgaaccacacggtctgtggcatatgtattgaatgtgcagtacttgtcaataccgctggtaacggtcagatacgatattttatccactccgccccgtgccatgcgcatggcaatgcccttggatatgtccttctccgttgtctctcccgccacaatagtctttcctgtttccaatattgcttgttccgttatccggcacacatggcggattcgttcaatttcccatggcgttttcaccatcctggctctctgtatagccagggatccatccgtgaaacggatgtccggctgggaatccatgattttcttcagcagctccatggaccagaagtactgcatgccgtctcctgcctccaggccaatggtccctgtatccggctggatttcctttatgattctgtcaatgatgctgatcggctcctccccctccagaggccccaggtttctgctggcagttccccagcagtagatgcggctggtccagctggtatactgtaccgtggtcttctccagtatcctcagtataatagccggatcccccttcctgggcaccagcacatataccggcctgaaaaggctggatgtataccaggagcggtagccggtggaataatatatattttcaggagtggagagcataagcatgtctatgtcctgcttttccatctcagcctgaagcttttcattatggaaccggaattcttccggcgaaaaagatttgtattcctgtgtcatatttcctcctaacgattatgcaaagattcctaaaagtccgcctgccagaccaaccaccgcaaccaggatgatgatattgacagacgaccagcccttctttaccaatttgtatgtgccaagggtcagcagcagcggaagcgctcccgggagaatcacgtcaaacagctgttcctggatattgaacatgacgcctccgcccacagggaccataagttttaatcccagggtcacataattgcctaccagtccgccaagcaccaggcaccccataatggatgcgcccagtatgagctggttaatcaggccgctttccataatggttacaatggcatcgctgcccttttcatatcccagcttgtaggactgccagtatatggtccacataaacagggcttccactataatgtagccaataacccccatgatgttgcctgtattggtaatgccgatgaataatgtaaggagcagcggcgtcaccacgcctccgtcaatggtatctccgatgcctgccagcggtcccataagaccggatttaatggatgtgatggtatcccctgtaatctcctcagagccctgggccctcttttcctccagagcagcggtcaggccgatgatacaggccccccactgaggctccgtgttaaagaactgcatatggttctgcatcagttccgcgcgttttccttggttatccgggtagagtttattgatgacaggcaccatggcgtgacagaaaccggttccctgcatcctctcataattatagttagcctgattgaacataatccaccggagccaggatttgcgtattgtcttcttgtccaaaagtacatacttgttctcattatttccctctgccccaaacaggctgccgcccatggcgctcagcttatggccttttaactgcatataaatcagggtgaatacaacagctgaaaatcccagggatatcatatccagcccaaaatactggaccagaaggaacccgaagaaaaagaataccacggactcacccttaaatatggattttaaggtcagggcaatacctactgcgggaagcatgccgccgatggtggtaaggacgcccactatgttttctcccaaaaactggatggcagacttaagataatctgtcccaaaatataccatcaggaaacagggtataaaggacatcagaaacagcagcagctggggcagcacgatattgggtatccaatagtacctggtatccccctttaacgacattttttccgctacccggacccaggccgtattgaccgtcatcttcaccacccatatgatggttcccagcagtcccacaggaactgccaaagccatggctgtctccacaggaagattgcccgtaatggcaatggtggtgcccaccacgccggccagacagatatcaccgggaagggctccgccggctccgatgaatcccagataaagaatgttaatctgggctcccaccatggcgccctttacagggtctcccaggataacgccggccaggaagccggaaacaaggggcctcatgacggtccaccagtttacacccagaacaaatgcactatttccccaaaagtataacaatgacaataatgtggctgttaagatactcatatgctacctcctccaaatcaaattctggcctgcttcactaaaacaggcttctgatgttaacggccttatcattcggaaccagctgataaaagatttccactcccccttccacaatccgtttaaagcattcaacctcctcaccgcttgccgacacattcctgttaaaggtcttccggccgttcttggcccccatgccgcccagaatcaccttctttatttcaatcccctctttgagaagtgactctatgatttccggaaccttcacaagtatcagaaaattctctcccttcaccggctcctccttcaggaactcccgggcttcggataccgactgtatcagcacctccacccccatgggagccgctgccttgtagatgcgctccatcagccggttctgggaaagctcgtcatcaataatgagtatcttattgattggatactgcttaatccaggcagtcactacctggccatgaatcagcctgtcgtcaattcttgtcaaaacaatgtttttcatatgcttttgctcctttcctatctgtatcagtctgcgcttatcactatcagccagcgcttgtctgtatcagcccgaacttgtctgtatcagcccgtgcttgtcagctcatctgcagcagaacgtggctgtctacaatcccttccttggccgtgtccaccagtcctgcaaaacttctgctgtttccgtccagcagacggcggttgatggcctctatcagcaaagggagattggtacccgtgatgtgtgtaaaggaacattcctcctccagctgaatcatggtgttaaacggtgttccgtacatcagatccgtaagcaccaggacttcctggcctgaatcattggagcgccggatggattgctccactccgtttctcatctcctccagattgcaccccggctccacacagtaagtctcgatatcaggctggttgcccaggatgagccgcgatgtccttaccaggctttcggccagtgaaccgtgtgtgaaaacaatgattttatacatattatctcccctccgtaataatattctgtatgaattccgtcatggcccaatccgggcaattgtccatgagatagaccattttcgatgcaaaaagcataaaatcccaattggacatatccataatcactttatccagcttcttttgcagcaaatccgtcacaaactggcagcggttaatgcccgcctcattatggacatagacaaactccacttcctttaatgcagtgacctttaaaaatcctgtcacaggtatctccatcggcttccggttccgcacttctacggcacatccgatatcgtacaggtcattcctggctctcataagttcccgcaaatacaaatcctccctgtgacggcatgatttcagcagattgttgatggccgagcagtccttctcatccagcagaggcgagataagcgcatagggtatcacatgttccctgctccccaggggcaccgtagataaaatcaaatcatattttttttgggacatttccagaaaatggttgtagtcactgctcaccacagtccattgaggataattctgggataatttatgcttcaggatattggtgatgctgtttgacatgttggaaaccagtatcacatccattttctcctcatcagccagcagctcgccctgaatgtacagcatcagataacaaatctcatcaaaacttatctccggcagcctgaacttttccgtcagtattctgcatataatctgacatacattgatggtacccttataattttcaagcagtatgtctatgattggattcctggccggggtgctggatgcagcccggttcagcatcagcgtaatatgggatatcacgttcacataaaatgttgattttgttctcagattgattcctgtaatcacagaaaacgcatcaataaaatcttcaccgaaggccactgccgttttcctggattcttcctccggcagttccttctgcatcaggaaattcccaagatgggtggcggccagaacattataaatatgtgaagtttcggatacagacagcgtataccggtaagaaccgctcagacgggaggccagctcaaacgcaatggcatccaggggatccctctcctgtttccggtaattgctttttaagaccggctccatgagaaacccatttctcaccctgtaaatcatcactagcaggttcacggaaaattccatgtattcccgctcgtcaaacctgtaaccggcagacgtctcaatgtgttttatgagtccttccacaaaattcaggtcttcctccgtaaagatgtccagaatcgtcatcagcgtttccgactcaaacatgcctgtggcggccggattgcctctggtattggcatttatattattgtccagaatatacagcagcagttccgccagggccttgcgcagacagctctctgttccctctaccgatgtccccccatgtccctgggtgattctcaattcatgctttccggcaaaaggcacaagggctttcagatccccggctatgctgctcttgcttacataatatttgtaggcaagtccggacagcgaggtggcctcatccgaatagagcagaaggttcagggcgatatccattcttctggacaattggttccaggacctggataatgcgccggaatccataagttccatcatataagctgaattcatcagcctttcccgctcctcctcactgatttcaagcctgattccggttccgggccggctctcaatgactccgttataggacgtcagaatctcattaactccgtgaatcattctgcgcagcgtcttgtccgatacatccattctccctgcgtagaagcccacgggcagatactcttcatgttccagcaaaagtctcagaaatgcaatctgtcttgaattcacgtcttatcctctccatacctcccaggtgccttttgatagcttgattatagcaagtgcagctgaggattgttagttttacggtttccttaatttgaccggaaccatgtggacaaaactgtacatacatttgaacataatgacgtgcctgtatctcatgttccggtgaatatctgcctattgtaccacgacagcctttgtaatataaggtgggggaaaatcagcccggaaccgggcggggcgggcaggatgggcggaatggctgagatggccgggcggaatagccgggatggtgagccgggatagccgggcgggtgagccgggatagccgggcggatgagccgggatggccgggcgggtgagccgggatggccgggcgggtgagccgggatggccgggcgggtgagccgggatggccgggcgggtgagccgggatggccgggcgggtgagccgggatggccgggcgggtgagccgggatggccgggcgggtgagccgggatggccgggcgggtgagccgggatggccgggatggccgggatgaccgggatggcgggcaggataacccggatggtatcagttcagtgggaaatggaaccgtgtataatagaatgtgcacaaggtggcggcacgaaaaaaggaagccctgatacaaaaggcttcccggacaaaaaaatagagcaggtgatgggaatcgaacccacgtatctagcttggaaggctagtgttctaccattgaactacacctgcatgaaatcaatctatttaattataatcggggtgacaggattcgaacctgcgacctcctggtcccaaaccaggcgctctagccaagctgagccacaccccggcgccggcataatataacctgtcatccaatcccgtctctcgacgcaaggattattatatactatgccttcccaaatgtcaacaaaaattctacagaaaattcagcgaaaaatgagcctccccctctttgtcaatctccatgagcatgaaagagggcttatgtccgtcctggcggggataggacaggcttcccggattcagcacaatcaaatccttatccccttcttttttttccacctcatagaagggcctgtgggtatgcccgaacataacgatatcgaaacctctggctctggcctcctgcttcaggtactcagctcccacagagacattatagtaatgtccgtgggtcagaagggtcttataccttccaatcatcagttccttctctttatccaggcatgagaaaaagtcattgtttcccaaaattatctctaaatcgcagtcttcattgacccaggtggcaatggcatgttcacttccctctgcgtctcccaaatgaatcagcatatcaagcggtccggtacgccggattacctcttttagattttcatcccttctgtgggtgtcactgacaattaatatcctcatccttcgtcctctccatctcttacttaagcacaccttccagggcttccttcatggcccttaatgccttccccctgtggctgatttcattcttctggtccatggtgatttcagcggatgttttgccgaactcaggcagatagagaatgggatcatacccgaaaccgccctccccagccggctcaccggcgataagcccctccatcacagcctctgtgtggagtacctggccgtccggcagcatggccgcgatgttgcacacaaacctggcgctgcgctcctggcccccggcctccttcagacgctctatgatactccggttcttaactgcatagggcgtatcttctcccagataccgggcagagtagataccgggctccccgccgatataatccacctccaggccggagtcatctgccagcacaatatccccggtcagattccacacagcccttgccttaatctcggcattctccccaaaggtggcaccgttctccacgatttccggttcggcgcccgcttccttcatggaaagtatgggaagccccaaatcagccaatataaggcgtatctcccgcatctttccctcattacccgttgcaaatatgattctgtgtcccatatcaaaaatcctctgccttctgttccttttataaaccgcttttatttctttgtatatgccttcaggcacaggttgcaggactgtgtttcctccacatgttcccacacctttccgtcatggctcagatacccttcgccgtctgttaagtccacctgggcaatgccgtcccctgcgtcgtattcaatggccaccggatgtacggtgccaggcgttattattttaactattatagcaaacttttcgttgtcctccaaggggatttttttatccaacggaatcgtgtaataaccggcattgtccagcctgccctttgccagcaacatccgcctatccagggcacgctccatttccccgccccctgcatccggcagattccgggccaaataaagctcgtactccgtattcttgtccgttgcatagaaacccgcggctgccagattctctcccttatccgccctgtaggcattggcaaaccaggcctcctcctgtccgtatccaatctgacccacccatccgcacaaatcactctggtgaatgtagtcataattgtccaccggctccacacctgtgtatacaatattatgaacaccgatattgctgtcaaagtaggatacataaaaatatccctggtcaccaaaatcctctccccagctgttggtacagataaatgcgccgtcccctgccaggtccagattaaaattttccctggagtaattatcatcccatcccacgatgacagaatcatggttgggcttttcgtttccaatgtaacaataggagttggtctctctgttatagtacacagactggctctggtaatccctcatggatgtataaagggaactctgtaccccgcctctcaggtacacggcccgtttaatggcctcgtaatccttggagggaaggacctgaatctcctgtacatgtacgctgggcgcaaggccgtccggcgaaactccgtccccatatgggtcctgggattccagcaccggtccctgccaggccagaagataggccatggacatggtatactcccctccctcgtcctgtcccaggaggaaactgttgtgcatggacatatggtctaccgcaaatgtcatggactttcccggaagcagggatgattccagggctgtcagggacgcaaacgcccagcaggttcccagggacccctggtttccaatctggggcgccctgcctgtctttcggtaatcataggcagaaggaagctttatattggccgtatccagcctgttccaccggtacacaccggttgtgctgcttccctgggcattctctccgttctctgatgtgtcccctcctgctgccgcaaaaccgcctgccccggaaggatttccggttccgcccgggttcaggctgctgccgctgtcctgtgtttcgccgggattctgtatgccgccgctgtcctgtgtcccgcccgggttctgtatgccgccgctgtcctgtgtccctccaggttcctgcatgccgccgctgtccctagtaccgcccggttcctgcatgccgccgctgtcctgtatcccgcccgggttctgtatgccgccggtatcctgtgtcccgtccgggtcctgaatcctgcccggagattgtgtctcagcaggattgttggcttggccgcacccggctgttcccaaagacaatgagaccgccagaaacagggctgctgcttttttccttattccatttctaactatatctgatacaacaaccatggccgccctctcaatttgaaccgttctcctggctgcgcctgggtggctttggccccatgaactgataaaaataggttttcagcatgccgttgtatatcttcctgtttttgtccgccttccgcccaatgtacttctgcgcatcttcataggaagtaatgaggtacatggaccaggcatccagcgccgcaaagcgctctcctatctcccggtataatgcgggaagattctccttttcctcgattctctccccgtagggcggattggatatgataaagccgtatttcttggggtggctcagcgcgctgaccgggcgctgctgaaagtgaatcatatggtccactccggctgactgggcattggttctggcggctttcacaatgtcaccatccacgtcatacccctggatatccacctgaacatcctcttccaccaggtcccccgcctcatccatggcttcataccaacatttgcgtttgatcacgtttctccactcctctgccagaaaggaacggttcatgcccggcgccatattggcagccatcatggccgcctcaatgggaaatgtaccgcttccgcagaaaggatccaccagaatcctgtcccggttccacggcgtcaggagaatcagggcagctgccagggtctctgtgatgggcgctttgctggtcaatgtcctgtacccgcgtttgtgcagggattccccgctggtgtcaatgcccaccgtcaccatatctttatagaggaacacccgcagcggatagctggctccattttcagggaaccaggtgactccatagcggtttttcagccgctccaccatggccttcttcataatcgactggatatccgacgggctgaacagcttgctcttgatggaagaagcctttgccacccagaacttgccgtcttcgggtataaagtcctcccagggtatattcctggtgccctgaaacaattcctcaaaggtctccgccttaaagcttcccgccttgagaagcacccgctctgcggtgcgcagaaacacattggcgcggcaaatggcctcgtcatctcctataaacgtgacgcggccgtcctccaccagggatatctcatatcccaggtccagaatttcttttttaagtactgcctccagcccaaaatggcagggggcaattaattcaaatgttttcaatcgtttttcctctcaatcagcctctcttttttacagcttcagttccttgaccacttcgccctccagggtccgtatggagaataccccatcctccagcatggcataggtgctggggttgcctcccttagggatggacacggagcctgggtttaacacggcaatatgcctgcccccctccgcctcgatggtctcggccttcagtatatgggtgtgaccatgtaccaggatatctccgtcctgcaatggcggaaggtgatcctggttgtatacatgtccgtgtgtggcgtaaaaagcctttccctccaacaccatcagaccatagtcagccattatgggaaactccagaaccatctggtccacttccgtgtcgcagtttcccctgattgcataaatctggtccttaagaggattcagcatggcgatcacctccttgggggcatattccctgggcaggtcattgcgggggccgtgatacaggatgtctcccagaatcacaagccgtccggctcccgattcactgtatatatccagcatcttcctgcaataatatgcagaaccgtgtatatccgatgcaaacattattttcatggctctgtctcctctaaaatagaataatcacgtttctattctaaagccgaaagcggcctcctgtcaatgtatttccccctgtaattcaacattccgcccgccaggtccacggcgtgatagcccatcctccacaggtcccggcagaccaccatgctcttggcccccctgtcacagtaaaatacaatggtaccgtccttgcggatttcccccatcaggttctcaagctcatcatagggaatgttcacgcttccccatatcctgtcctgctcaaacatccagggctccctcaggtccaccagctgcgcaatctttccctgttccatccattggtcaaactgtctgtatgatatcattggaaatgtcgtcatttcccactcaccttccctttctgtcacgttctgtccgggctaatgcctgtcattcgtgtcctactaccaatatatgcaggcattaccatggggtgaggacaagaaaaagcccactccgcgtcatgcgaagcaggctccttccatcatctgtactcagtacgccgcagctttttcgatattagtagttgttgttctggctgctgttgcggctgctgttctgagagctgtttctggagctgttctgagaattgttctggctgttgttctgagaactgttctgggaattgttctgagaattgttctgagaactattcctagagctgttctgagagctgttctggctgttattctgctggctgcagtttcttgagctgttttccatgtcgttgttgaagttattcttattagacatcttcaatacctcctaaaaacattcttttttagttacagccttagtatggcagaattgcacaccttttattcgataaaataaaaaaaggttgcttttttccataaaatatattataaataatatgaggtaaaatggtttcccttaaaccatgacctcatccttattaattatttatactccccttgagaagtccccggatagctcccctatccggggacaactctttgtaatttcgttgtatctgcttccctattttcactcccctatttttttcaattctcccttgacttcaaccgtaaaacatggtatgtttaatgggtatttttaataagattttgatttcacatatttttgtaagtcattattcctatgatgatttacaaaaatatgtgatttttatttttatcgaaaatataatattatattatggaggtatctttcatgaacaaaggtacagtaaaatggtttaactcacagaagggctacggcttcatcacaaacgaagagaacggaatggatattttcgttcatttttccggaattgcctccaatggcttcaagtctctggaagaaggccaggccgttacatttgacattacaaacagcccaagaggcttacaggcagtaaatgtttgcgctgcataatagagattgacctgacagggaccgttttccaaaaggaagcggtctcttttttataccttggtcgttcctattttcatattaccgttatcttttagttctgccagacagcacaaaggcccgccggaatactccgacaggccctgcttatatatattgaaaatcctatcctagcacatttactatcttcaccggattcctgtaattccagttggacacggtaatgcctgtcctctccgttgaagcatgtacgatctgtccgttgccaatatacatggctacgtggttaatacttcttccgctgccgtaaaaaatcaaatctcccggctgcatctggtcagcgctaatggcgatcccctgctgggcttgtccgccggaagaacggttcatggaaattcctgctgaattctgcagtacgtatctggtaaatccggaacagtccgtccctgtacgcgggtcgctgccgccgtacttatatcttccgcctacaaactgcatggcgtaattcaccacctgctggcgcttatatgtatctgaggattcaatggcatcctgctgtacctctgccatctcactttctcctacctgctccacggtagcattaccggatacaggcagaaatccttcggattcattgacccggaccttcatccatccgtttcccatatcctccaggacttcgtatgtattccctgttttggctgtcatcagtacttcttcactgtcttggcttttgttaatgttgacgctctccgctgtaatggtggcaatgtatgtacctgctgtgaatccaggaccgattgcagccagggaagtaaatggattcatgaccatcagcatcccgcatacagctcctgcctttaaaaggctgcctaacatttttctcattgaagaaactctcccatcatggttttatactgaatgtagccggagtttatttattacataattgttacattcattacaaatgtattatatcacaattttatctcacgtcaacatttttagacatatttaatatttccttcattatttttaacattttatgtagtaattttgaattaaaaatgaatttcctccctgatacggctcccctcccggcccagatcacaaaaaaacctgctgtctcaggacagcaggcttacaatcttaactggttttctgtaattatatggggacgtcttgattcccgtcttttctgtggatgcatgcaccacttccccgtctccaatgtacagggccacatggttgatgcccccgcctccggcgtaaaacaacaggtcgcccggctgcatctgctcctcagtcacagccttcccgtatgaggactgtccggtggacgaatgaggaagactgatggaagcagccttgcccagcacgtatctggtaaagccggagcagtccactcccttattggggtccacaccgccgtactggtaacgtccgcccacgaactgaagggcatactccactacctgacggcgcatcttggcatcctcatccacggtttcatgcgctttttccacaaccgtggcattaccggaggtctttatgtatccttcccttccgccggtgcgtatcttaacccagccctgttccgttcttcccaacacctcataagtctggcccctcataacctggccctgtctggacgaaccttcactggcacttctgtgtacgtccacagcaggcgcctctatcttcactacataggaggaccgggtctggacctctgcctgctttacagcagcctggctgtccatagggttcaccgcccacagtcctgcacacaggcatataagccctgatgccttaatgattcctttccctaatccccttatgctcacgctgactctcctaacttccatctattttcctgaaaatgtaaatattacgcaaatattacgtttattaaaaacagtatattatttattcacatttttgtcaagaaaaaggagctgttttttaacagctcctgccatgtgcttctttcatatgtttctttcatatgcttttgccatatgccttggtcatatgctttttccatatacttccgccccatcagcccaatatctgcttctgattatctcctgggtcccctgaacatccacacggccagcattaccagcagcaccggccatatataggacagaatccagccagccagtcccatgatgccgaagaacacagtcatcaccaggaatatgaccaggaataccaccagcccggcaatgagcctgacataccacttgccaaagtccacataatggacctccggttttttccccctgaacggttcccgttcttcctggctgcttcctgccggccctgaacggtaggatgcttctgattcaaaggaatcaaatccatccggcctgtcctcggtgtcaagggcagcgtccactatggtcctggcaatgattctcggacctcccaggctctctatgacctcatcctctgtctgtcccttggcagcctcctccataatataggagtcataataccgcaaattctcctgtatgacggaatagggtacccgtccttccagctcactttttagtccctgcaaaaattctgtcctgctcattactcaaccctttccttaatcgttccctctctgtaagcagctaccagctccttcaaatcggctatctgtccttttaattcttttcctttatccgtatcagccaccatcaccctgctctttactttctccaccacggatacctttggcgtgctctccttcttagggtcaaagggcctgtgctctgccagagccaggtgatgtgaattataaatcagggtatatcccgcaatgcccgtggtgctctggtatgccttcgagagaccgccgtcaatgatgaacagcttaccgcccgccttcatgggcttctccccatcctttagcttaaccggcacatggccgttgataatgtgggagccctccacgggaagcccgaattcctccagcaggcggttgcagaattcttccttcaggctcagctggtagtaggggttcatcacttccttatatgtggatttatcctccacgaaataatgttcaaaggtagtcatcttatccttgccgaatacaggggatttggccccgcaccacagataccacatcatatccatggcctgctccttaccgggcgtcccctccggcatgaaataggcattctgaacctgctggttaaagaagtccatcagcgccttcccgccataggataccccgttcatggtgatggtatcgaaagaaccgtcctttttcatgggaatacagccatggtaaaggaggttggaattataacatttataaatggccccatgggagtacaggaatcttatatgcttatgcagcagttccccatgcttgaaggaggcctgcagggtgcgcagcagctccttctcaccacggctcagctccagaggattctttgggtccacggtcgggaaattcatgtccagcatgggaaatgtttttccttcaatgaccactgtacccttctcaaagtccacgccggacaaaaggaccctgttgtccatctcatactccggatggcgcttaatcatggcgccctccactttaaactgaatcaccgcaatggccttgtgcatcttggccgccaggccggggtccactgcatcgtaaatgttctcgtccagaattttgggcatgaaccgtgtgcaggggtcgtcctggtacaccttggctgcaaacatggaaaggggccttaggttgatgccgtaaccatcctccagcacatcaaagctgttgtaactgatggcaatgcgcagcacattgcagatgcaggccagatttcctgttgctgcccccatccatgaaatatcatgattcccccactgtatatccacatcgtggaagcacatgagctcattcatgataatgtccgcccttggccccctgtcgtagatgtcgcctatgatatgaaggttgtcaatggtcaggttctgaatcagatggcacagggcaatgatgaacttgtccgccgtgtcattctcaatgatggagtgtataatttcgttatagtacagtttcttgttatcgtcgttgtagtccacgtgaagcagctcgtcaatgatgtaggcaaattcctgcggcatcttcttgcggacttttgagcgggtgtacttggaggacacctccttgcagctttgtaccagacggtagatggtgattttctgccaatcctcggtgtagtgcccctgtttcatcatacgggccaggttccgctccggataataaatcaggtttgccagctgtacctgctcctcctcgggaatcaggtggccgaaggtctccttgattttctcccgggtaatgccggacgaagaacgcagcaggtgtataaacgcctcatattccccgtgcaagtcgctgaaaaaatattcggttcccttgggaagactgcaaatcgctgtcagattgacaatttcactggtggcttcctttactgtggggtattcttttgccaggagcttaagatatgccaaatccctcatcatcatattcccccaatcccaattgcattttatttaaagttatagtaacatattcttaatgaaatgaaaagtttttccaactgaacaaaggtttaagattatctaaattttttctaaggagaagagatgccaatggaggaattatacgtatttggaacaggaaacgcccaggccacccgctgttataatacctgttttgccataaaggacggggatgaatatttcatggtggatgcaggaggaggaaacggcatcctgcgcatcctggaggatatggatgtggacctgtgccatatccacaacattttcgtcacccatgagcacacggaccacatcatgggtattgtgtggatggtgcgcatggtggctgctgccatgaaaaaaggaaagtatgaaggcgagctgcagatttactgccaccagggactggtggataccatctccaccatctgccgcctgacgatccagggcaagttctataagatgattggaagccgcattttcctggtgccggtggaggacggcgagacagtccatatcctggactatgacgtcaccttctttgatatactgtccaccaaggccaggcagttcggatttaccaccactctgaaaaacggccgccggttcacctgcgcaggcgatgagccgtacaacgcggagtgccgcccctacgtggaaggcagtgactggctgcttcacgaagccttctgcctgtaccgcgaccgtgatatcttcgaaccctatgaaaaacaccacagcacggtaaaagaggcctgcgagctggcaaaggagctctccatccccaaccttgtgctatggcatacggaggacaaacacctgtcggagcgcaaagccctatatacggctgagggcagggaatactatgacggcaatctgctggtgccggatgacggggaaatcatcccgctgtaaacgtgcggtgtacgccgcattcgtgtacacaggattcgtgtacggcggatttatctacggcggattacagagttatgttaagagataggaaatcaccacggttctatattgccgtggtggttttttacttacatgggcaagaatagtcgagaaatcctttttccggttctgtataatgataaacgtcggaggtgatacagatgaaagaacagatagaagcagtccaaagaatgcaggattatatagagagccactggcaggagtccattactctggctgatttatccaaggcctcccatttttctccctggtattctgccaggctgttcaggaagctgaccggtctttcgccggctgactacatccggcgttacaaactgtcccggtccgccctgcggctgcgggacgaggactgcaaagtcattgatgttgcttttgatttgggattcggaagcgtggacggataccagagggcatttctccgtgaattcggctgtaatccccgtgaatacgccgctcatcccgttcccctgtatctgatgaccccctacggcgtaaaatacagattcacagaaaaggagcccatgaatatggaacaaattaagaacgtatttattcaggtcattgaaaaaccagcccgcaaggtcatccttaagcggggcatccaggcgtatgattacatgacctactgcaatgaagccggctgtgatgtgtggggacttctcaccagcatcaaatccataagcggcgaaccggtatgcctctggctccccgaacaataccgcccggagggtacatcccaatacgttcagggcgtggaagtatcctcagactacggcggtcctgtgccggagggctttgatgtaatccagctgccagctgccagttacctcatgtttcagggagagcccttcgaggaagaggacttctgccaggccatacagatggttcagacagccatggaacgttacgacctgtcggtcatcggcctggcccctgaccctgaaaatcccagaattcagctggaacccatagggaccaggggatatatcgaaatgcttccggtaaaacaggctgtatcctcatctcattaacacccggcgccggctgttaatccttaagaagccttaaccgcccgccgtcctgaatccgaatggatgataacgctgacccttttatagaccagggcggtgagcaggcttacaatggcgcctttcagtatattaaaggggcctacagccaggattacgaatgtccacacattgctgatagccgggttgatggccgcgcctgcagcaatgatggtgtccaggggcatgaaatgggaatagaacggaagcataacaaccgcattgagtatcacagccacaattgtcatgattacagttcccgcagccattcccatgacagccccctttttcgtctttttaagcctgtaaataataccggccggcagcacaagggagcatccaaagcagaaattggcaaactcccccacaaatcctgtgctggtaggctttagtatcagcttcaccagtattttcaccagttccatgacaacgcctgccacaggccccagggcaaaggtacccacaagcaccggcacctcactgatatccatgccgtaaaatgacggcgcaataaatggtagcggcacctcaaaaatcataagcactgccgccagggcgccgaacatggccatgacggttacattccttacactgagtaagtgattctgtttcatttccctatcctccttgttatgagcacttagtgaccgtattttggtcacttacgtgcgatacatgacccttcacttggtgaggtctcccacgaacctagtgaaggggcccgttatgagcacttggtgtccgttttccggtcacttacgtgcgtatatgtgtccttcggaatgcgtgcactataaaagccccggatacgcaaataatccggggcctgttcatctaccacttacacaccttcttctctcatccagactatactgtcggttctggaatcacaccagatcagccgccgtagcgggtcgcggactattaccgccggtagggaatcacaccctgccccgaagaactttatttaattatagctgaatcatagcacatatgagggtggttggcaataggctgcgccataatttccccatttccccatttcaaacccaacgttctgactcagcgcttccagactaccacatcctccagctttttgcgcggacgtggcggcggcgattcctccggatacccaaaggccacggctgccaccagctcatccccgcagtccatccatgcgcacagctcctcataggcaaagaatatgtcgcagatccacagactgccgattcccatatccgttgcttccaaaagcatattctcaattgccgcgctgacagactggatattacagagctcataaatcctgtcctcgtcgttgaggggagaaaacatccccttccccaggggatttaggacaaatatgaccacaggcgcctgttccatgatttgtaccgtgtactccgcgcctcccaggtgcctgctgctgtccggcagcatggcttttcctgccttctcccgctggattccggcctgaaacgccctcagcatgttttcttttgcctgtccctgaatgaccataaatttccatggctgcctgttctttgctgacggtgcctttatcccgctttccacaattttacagataacctcatggggtatttccttgtctgagaacctgcgtatacttctgcgcctgtctattgcatccattttctgtctccttcgtattttccgggcaggctaaactcctatggccattattcttctatggccattattcttctgcggctggtatctccatacccgcaattctcctgtacccgctactctcccaaagccatcctgtaaatttccatcatctcttccttgcccagttcccggatgcccggcagggtacgctttcccatgttggtgcacttgacagccatttcttccaggcgttcttcctccacacccagttcttttaaggaagagggcatacccaggctcttatagaaatcttctgtggcccggattcctgccagggccgtgttcatagggcagtcaaaatccatgtctatgttccacacctggaccgcataacgtgcgaagcggttcacatcactggggcacacaaacctggcccaggatggccacagggctgccagacctgctccgtgggcaatggatgggtacatgccggaaagctcatgctccagctggtggacctgcatgaagaactcccttccagcccctgtcaacccgttgtgggaaaggcttcctccccacataagagcggctctggcttcatagttacccggatctttatcagcaatccttcctgcctccaccgtggattttaacaatgcctcggctatgcggtccgtcagttccgtatccctggtcttgctgaaataccgctccagggtatgcatcatgatatccactgttccgcaggctgtctggtatttgcttaccgtgcaggtcagctccgggttgcagatggaaaacagcgggcggtgggtcacgctgttaaagccccgcttaaatccattttcctcatttgtaatgacacaggacgcgctcatttcactgcccgaggcagaaagcgtaagaatgacgcccaccggcaatgccctggcaggcacagcctcctggcggaaataggtccatacatccacatccgggttccctgcgccgtctgctatacacttggatgagtcaatcacgctgcctcctccaacagccagcaccagatccacgccctccttcaggcacagttcgatgccctccttggccttagacagagtgggattggcctgtacgccccccagcgtcacatactgtattccctctgcctcaagagagcctgtaactgcgtccagaagtccggacttcttagcgctggacccgccgaaatgcaccagcaccttcttaaatccgtattccttgacaatctttcctacctgctgatgggtattctttccaaatatcatcctggttggtgtaaaaaactcaaaattttccattatgtaatcctccttcatgccgctttcaccgctgtctccattatacataaatcagggcgctttttccacttaaatctgctacctgttcagccctgcgccagtttgtccttatacccgctttcccattcccccactctcctccccgcctgaaataccagactcctgccagagccccatgaaaggaagggaatgcctgtttcaccccacccacccccattaaaaccaggcacaccccatacaatccaacaggaaattaatacgccgcgcattccccggatcgcaaaaaaaggccgcagacgaagcatcgctgcggcctgaaaatccattcttcactgcaaggcaaagcctgccggggaaatgctccgattccatcagcctggtacttgtgatgccatgttgctgatggagggccggagatgtaccatgctgctgatggagagccggagatgtaaataccggcatcaggacagattatcgcgaaatgttctcaccatctgttcctgccaggcccctccgtattcccccatgaccagcctttttagcgcctcggccgggaaccggcgccaggacatctcctcatgctttaccaggatgggatagtaatataccccgttgtccgccgctgcctcacagtcccccggcgcatcccccaccatgagcacatggtccgggcaatacccctttttcagaagagcgttgatacaggcagactttgacccggagtcctgggacaggaccacgtccacgtattccatcaggccctgtctctgccattcttcctccaccgcctttttgttggcagaggataccactgccacgtccgctgtctcatgggccgccttaagggcctcacgcacaccgtcaaaggcgcatttggcgtcttccggcatggccccgattttccggtttacttcctcagaccattccagtgcctgtcggaatatctcctttccggtccgttcccactgggcctttaccgcctggtttgacaactccggcgcttcccctgtccatcggacaaaggcatccacatccggcactgctttatatgtccggtcaatttctgccagaatcatggccaggcccttaaagcggttgattcccctggtcatggtgtaaagattgatctcatcccaacgcctgcgtatcttctgctcccacggtgaaagcccccagaccggaatcagacagggcccgaaacaggttatatgttttgagtccatggtatccatggcacagccgtctgaatcgacgcagatcagatattccttttgcttcctgtatccctctaatatgtccggcatccgaagctctcctctcctttacgccactgcatattaccggaactggtaccagtagtcctgtacatcctgcagatttttatagacgaagtcataattaatcatccaaagcttcatatcctccaaggggatattgccatctgccggggttgtctccgggcgtaccggccatcctccgatggtgttgaatggtttgataccatttccgtttccatcctcgccgcctaacagatagcgaatcagcagcttggctccgtttggatgaggcgcctcgtttaccactgccacaaagttcatgaaggccacgccggaaacaggctccatcttaaggggctcagattcgatattccaccccttgtcagcccgctcccggtacttggaggacggtgtgtagccaatgagctttgactccttgccctctcccacagactggatgacctcgttgtttgagtcaaagatgaccggatcattttccagcacccgcttcatccaggcatgggctgccgtgggctcgtcgtccgccagtacaatatcctcgccgtagcacgccttataggcttccgccatctcgtccgcatgctccaccatagtggtgaacagggccatgtagctcactgtgccgattgggttctggagcacgaagcttcccttccattccggctttgtcacatcccaccagttggtgatgggggtttccgtatagatgccggtattgtagaaccaccagtcagtctcaaagtacaaaggcgtcatatcctttaaatattcctggttcacattcttgtaaatggattcaggctggtaattgtgcaggattcccttgttaaagaaattaatcatgtaatcccctgtctgttccttggaatggattacgtcagctgtgcgtatacccgagttgtactctgtactcagtttggtggacatgtcattggcattgatgtcatatacctccagggtcatgccgggataatcctcctcaaagctggcctttaccttagccatacggctggaaatggaataaatgactaccttcccgccctcctcgtccagtgccttcttatacagttcatctgaggattcatcctcatacagtcccgcgtccacggcccactgctcctccggggcagacgctgcatttcctcctgctgcattttcccctgccgcattctcccctgccttgtctccagccgcctccttctgcgtctctcctgctcccggctgctccccggccttgccctcatctgctgccttggcagctgttgtgttcccggatgcagcctttgtgtcctcaatcttttcgcagcccgtaagcgcagatgcagccatcacgcctgccaaagccagtgccaataaacgttttcctcttctcctcatgatttcttctcctttatcatttatttgaattttgttggtcctgctgtgcgtccatgacagccagctttgccagcctgccgctgtccttgcaaaacacgttcatcttatccggattaatccgcagccacaccttttgatccggactgtactgcttaagtccgttctgcttggacaggattcgttccccgcccacctccaggtaaatggttgtctctgaaccggccggcatcacagagtatacttccgcctctatgctcccctctgcgggtccgtccagtatctccaccaactccggtctcaccccgaccactgcctcaaagcttccgtcacccggggcttccccggtaaaggacttcctgtcataagacacggttcccaaaacggattccacggtcatggtatctcccgccaccctggcctttcccggaaggaaattcacctttggattgccgataaagtcagccacccgcagggaggcaggattctggtacagctccatgggcggtgccacctgctccagcacaccctcaaagaaaatggctattttggtagacatggtcagggcctctgtctggtcatgggtcacatagataatggtggtgcctaactcctgatggagccgtttaatttcacttctcatctcgattctcagcttggcgtccagattggacagcggctcgtccaaaagcagcacctccggctccgacacaatggccctggctatggccacgcgctgctgctgtccgcctgacagttccgacggataccggtcaatgaacgcctcaatcctcatgcgttttaaggcattttccaccttccttcgtatctcctccttgggcacctttgccacttccaggccaaaggccacattgtcaaataccgtcatatggggccaaagggcatacgactggaataccaggttaagatggcgttttcccggttcctcataaaacttttcaggcgcattgacaatctccctgtcccccatatacatatacccttcctggggcttctccaggcctgccaccacgcgcagggtggttgtctttccgcagccggacggccccagcagtgtcataaactccccgtcctcaatcaccaggttgatgtcctttaacacatggttcctgccataatatttattgattcctcttaattcaattctgctcatctttcatatcctcccgcattaaaagcccttggtgatgtccgcgtccgtaaaggtattggcaaaccagtagacgaagaataccagcacaaacataacgatggtcactgcactggacagctgaatcagattttccgccgaataggcgtacgccatatagggcagcgtctgctggctgggcgtcatgagtataactatcaggtccagttccttcatgatgctgataaacaccagcatgaatccgcttatcataccgccctttgacagagggaacacaatcttaaagaacctgcgcaggaatcccgcgttttccacctgggcggcttcctctaactccgtactgatctggagcatattggatgttcccgccctggaggcaaagggcatgttcttcaccacagcgataagcaccagcagggcaaaggagccgtacagggacggtaccagggtgatgcggtagccgaacatttctattttcttagccgttgcaaagagagccaggtacatggcgccaaaggcaatggatggaatcaggtaaggtataaataccagctgctccaccagttttcctgagaacagcttgcgtcccctggaattgatatagccaatcagctgtccgaacacggttgcaaacagggaggtaagcaccaccagcttgatggtgttgaccacatatttcatgaactgcggattcttaaatatacccggctcgccctggtcaatggtgggcacggaacctccggtccagtaatgaagggtgaaattgctgaggctgtagttgcccggctccagcataaaggactggtacagcagaatgaccaccggaaacacaacggccactgcgatgaaggcaatgagaatccccacgataaccggcctccatttgcccaggcgtatgggattgctcctgctgccctttcctcctatggtactgaaggattttctggaaccaatggccttctggtttaagaacacgctgaaggaggcaatggctatgagaatcagagatatggcaaacgccacccggttctgcccgttctgtatggagttgtacatggtggtggatacggtgtagtatccgattttaagccctaaaaccgacggaacgccgaaggtgcccattgcctttgaaaaggtcatgataaccgcggacagaatagccggcatcaccagcgggaatgtaatctttgtaagtatcctggccttgctggctcccaggatttcccccatctcttccagctccgagttgatggagctgagggccgaggacaccagcaggtaggcataggcataatagtggatgactaacaccacgataatggcaaacggcccgtaggccagccagtccggtgtctgaatccccaaaaatcccagaaggccctgggcgccgcccacgcgttcattcttgaatatggtcagccatgccatggacttgcaccaggatggtatcatatagggaatgatgagggccagggaaaagaatttcttatatggcaggtcgctgcggaccatgagccatgccagcagtgagcccagggtaattccaaacgcagccgtgcacacggatatcaataaggaattcttaaggggcgtccacagcattttctgggaaatgctgctggtcagaacccgtttccagtaatagagggtaaacatcccctcccttcccccgtccaccctggccgcgtctgcgcctgccagggtaagcgtctgtataatcatctgtcccagaggaatcagaatcagataaaccatgaatatcacggaaatcaccaccatgatattgtatggattctttacaatgcttcctgcctgattcataagacggcgtttcctggaaaattcccggacgccgccttttgttccggcctttgtatctgtctgcatactgcctgctcctttctgttgcctgcatactctcttctgtcagcccttcattttatcccttgtttatcccttgtctatcccttgcaggaacggcgctccaccagcctcggttccagcttcacagaagcctttccccccactggcgcgccctcctccaccattcccagcagcagctccacggcggtctccatctgttcctcatgggaaactgccaccgttgtaagctcgatgtagggcaattcctcggttatgttgtcaaacccaatgagtgaaaaatcctcaggtatgcggattccattttcccggcatgctttgacaatcccgttggccgtggcatcgctggcagccacgattccgtccggcatggccagtccgctttgaaggaaatgcttgaagtggttatatcccctttcaaagctggtccgaaaatccagattgcactcgtatacctgggccggaatccgctttgccctggctgtctccagaaaactggcggccctgtagcggtgggccaggcgttcgggcttgaaccccacaaacagcaggttcctgcaccctttggatatgagatactcggcggcgattctgcccgcctgctcctcgtcggcgcagacatagggaatcccgcactggcccgtaagctcgttaagggctaccatgggtacattatgaataaactcagccatgctctccgtgctcctgggaccaatgggaaatatcaggattccctccacctggtgctctgccagaagcttcagataatccctctctgccttcagctcccggaagctgttgcataataatacctgataccctcttttgtgggcagcatccgaggccttcaccatgagttcggaataaaaagggctcatgatatccggcatgatgatgcctatggtctgagtcctgcgcttcacaagactccgggccaggccgttgggcgtgtaggagagccgttcgcatacccgtaatatccggctgcggttttcctcgctgataccatccatcccgtttaacgccctggatacagaggcgatggatacccctgcctccctggcaatatctttgattgtcacttgtttcataataggccttctccccatttctccgttttaaagaatggttttcgtaaacgtttacgcttaaaaatattataccatcagccaggttttcccgccatttccagaaccaacaaaatgcacaggtacccctatgcattttgcataataatttaggcattttttcgtaaattttacggccgtatacgtttacggccaaaagaaggaagtttttcttttgtacaaattgcccctcccccttcattcatgcataaaacagcacggacagacataagattactccaggacccatatttcccaaaagggtgtcaggaggcggttatatcatgagattcttccgaatgctccgggagcatttacatatcagtacaaagacagtgatttacggggaaatgatggtgctgagcctgctgtgtctcagcatcttcctgtttaaaacagacccgggccaggcagtcatgagccaggcctccaggctggccggatacatgaatcccctggaaaacataaacggaacagacccggacaagacagggacagataagaaagaagctaaaaataaggattatatcaaatgggtggacttcggtgtcacctcggaggccatgaaccaggcattccgccttgacgtggacacctgccaggctgacgttcatctgaactgggtggatttgctggcctatctgggaacccgttacggcggggatttttccaaatataagccggaacacatgaccgctgtggcagaaaaactgaaaaatggtgaaaccaccatagaagaactgacaaaagacatgaaatattactcttattaccgccaggcctacggagctgtattagacggcatggtagggcagtttgaggcagagataccggcaggcgaagccccggccgcttatctgccttccggagtggcaggaggcgcccccggagaccccgccacggtctgggtgaccaaatacgggctcaaggcattttctcccattgccaagggctttccctacagcgattttgacgactttggcgtggcccgcagctatggcttcaagcgccagcacctgggccacgacatgatgggccaggtgggaactccggtggttgccgtggaatccggctatgtggaagccctgggctggaaccagtacggcggctggcggctgggaatacgcagctttgaccacaagcggtactactattacgcccatctgcgcaagaattacccctaccagtcaggcctggaggtgggaagcgtggtgcaggccggggacgtcataggctatctggggcgcaccggttacagccgcaccgagaacaccaacaacatcgacgacccccatctccactttggcctggaactcatatttgatgagtcccaaaaggacagcaacaatgaaatctgggtcagctgttatgaactggtaaaattcctgaatctgaaccgctgtgaggcggtaaaggtggagggcacaaaggagtggaaacggttatacggcatcaaggacccgctggttccggtgcagcccgccacaccgtcccaggccggaccccagacagaatcccaggccggaccccagacagacccccaggccggatcccaggcggaatcataggttcattccgccaaaaggcgcctcctccttttcttaccctctcacccgcggctgtccttctcgcccaccacagccacacctccgttctttaagaactccgagggcgtcacattggtgtatttcttgaatacgccgcagaaatgtttatactcgctgaatcccagctcatcggatatctcatagatccgcatggtgccctggctcagcatattcagggccttcttaatccggtactggttcagcaggtccacaaaggtggtgttaagcccggccttcagcttcctgctgagatagctggtgctgacccccaggctttccgccacctggttgatgctcaccttttccttgtaatgctgcttcacgaactcataggttctctttacgtagggatccatgctgttctttgcgctgtcaaatatcttccattcatcatagactgtcagtagcctgtcctgggatatcttctcgattttctcatacttgctggcgtaagctatctgctgacggattttgtccagagactccttcagctcatcctcgtccacaggctttagcagatagtccgtgacacccatatggatggcctgccgggccagctcaaactccgaatagctggtcagcaccaggctgtaaaactgctggtccttgatggctgtctctatcatcttaagcccgttcatcttaggcatttttatgtcggtcagcacaatatccggctgctccctccgtatggtctccagcccctctgccccatccttggccgtgcccacaataatacagcccatgtccagccagtttaaggcgaaggtaagaccctttctgatgatctcctcatcctccacaatcactacttttaataacatgacagaatccccccatccttacaccgggagtgcgccgtcccctgtgccttactcttcgcagggcacccggagcgtcaccactgtccccttttccatttcactgtcaattcccactccatacccgcttccatagaccagacgtatcctcttatggacattgtagatgccgatatggtctgtctggttctgtccctggtccagattggccttcagcttctccagaagctctgtgctgattcccactccgtcgtccgatataatgacggagagaacctcattttgtatcctggtgctgatacggatctccaggcagtcacggtcctcaccaaaaccgtatttgatggaattctccacaatgggctgcagggccatccttggtatggacgcattcctgctgccctcctccaggtcaatgctgtatcttaaccggtcgccataccggtagagcataacctgcagataccggctgatgaaatccatctcctccttcaccgtcaccacatccttgccgttctggatgctgtagcgcagcattctggacaggctgaccagcatcttctccgcctcccccggcccgaactttatcatataccggatagattccagggtattgaagagaaaatgcgggttaaactgtgattccagaatctggaccgtggccagcatgttctcctttgccagttcctgatgcctggccagcagatggcgtatgctgcctatcatggtgttgaaggaatggccgatgcgctcaaactcatcacccgaggtgatttccagggacacatccaaatcccccttctccacctggtccagggcgcctatgagatcgtaaatgatttccgtctttttgtccgccaccttgcctgcgctcctgtagatggccagggtcactgccagggccagaaatcccaccagcaccagggacataaggcacagctggacaaaggatgtacagtcgtatatgacctgtacggacgcctcctcatccagcacggacacgctgtccgtgtaataccatctgttctccagatgcaccatgctgccgccgtcgcggaattcctccaccagcttgccccggtcgttctggaacctggacaccccgtcggtaaacagccggttgaacttgttaatcagcagtacgggctgttccatatttcccagccgttccttaaacgcatctgctttcagcacaaagccgctgtatccctggagccttccgtcctttaccacggtctggaacatgagccatgcaggaagggcccttccgtctatcaccgtattgtcatagataaagatacagtcatttttgctgtcattctggtccgttgtgttccagggcagataatttcctatgtactgtatgacattggactggctgttggtggaaaaaaccagattcctgtcccggtcaaacaggtaatagtcacccctgtaaacctgcccgttaaggaaccggtaaatctccgacactgcctctgtcttataggatggcagccccttaaactgttccacgtccagctcccctgccatccttttattctcgtccacatagctgtctataacgccctcaaactccccggaaaagtgctccagcatggtcctgctcttccggatgatctgctgggaccccactgctgtaaacaccagaagcaggaccaccagcgatataaagcaaggtgcaagcgcatggaaaatcaaacttttccggatttcgtccctgaaacatgtttgttttcgcttcttcatacgcctgcaccttttaccatttttaatattaacacactgcacaatactgcagttttcagtttatcatacggcagttacattgtcacgtccttattgcccgacaccttgaagaagatgagcagggataccacggtggtaacggtgaggatggttgccagggcagcggctgttccgtagctggcccggatgacctcattgtatatggccaccgacatggtccttgtgttggccgtatagagcatgacggaagaactcagttcattaatcaaagtaatccagcttaatatggcgccggacgcaacacccggaagcatcattttcgccgtcaccttcacaaaggacatggatggtgaatcgcccaggctgatggcggcctcctccatgctgggactgatctggtaaagaatggcggagctggaacgcagcgtgtatgcctgcctccggatgaccagggatatgaccataatgatggcggaaccggccagcatcataggaggatggttaaatgcaatcagtaacgtaataccaaggacggaacccggtacaatgtacgggaacatggcaatggtgtcaatggcgttggtcagccagctcttgcgcctcactgccaggtacgcgatgagcatgcccaggaccacgataatcacaatagctgccaggcagtaaagatatgtattcttgatggactggatggctgtggagaacaccttgcggtagctttccagggaaaatccatccacaaacacctgcatcttggtggcgcggaaggaggtgtaaacaaccatgcactggggtatgatggaggtggctgccagcagatagataaacaggtgaatgaaaaagcctttgattccatggacctccttgggctgaatcggcctcatggagctcatggtaaaggacttggtattcacataccatttctgcagcaggaacacagttgcggtgactaccaccataatggtcgccatacatgccgcaaagttggcggaaccgcctgtctctcccacgaactcggagtataccagggtgggcataacacggtatccctcgccaatcagggccggggtgccaaagtctgccatacagttcatgaacaccagcagggctgccgctatcagggtaggggtgaccaggggcatgattacggtaaagacctttttcaggcctccgcatcccaggctttccgccgcctcagacagggccacatctatctttttgagggctcccgatacatacatgtagataaacggatacagcttaagggcaaataccagcagcattcctccaaagccgtaaatagacggcatgtggattcccaggccctttaagaactgggtcacggttccgcttcttcccagaagcaggatccaggagtaggcgccgataaagttgggactcatcatggagatgatgaacaggatttccagcaggccttttccttttatcttataaaacgacatgaaataggccagaggcacccccagtataatggctaccacggtcacgctgaaggtcagcttaaacgagttgagcagtgcgcttttataatacttctttgaaaagaacctggcatagttgtcaatggtccagactcctgtctccgtgtccttgaaaccgcttaagaaaaggctgatgagcggatagagaaggaacagggcaaacagggcaatgatgaccactgtcacaatcgtccagaagtcccacctgattttcttattcgtcatatctcttcacatcctttatcagactctgttccatgtcctgggtgaacacgttgattttattggggttcggtctaaggcgtatcttttctcccactgagaatatgcggtccacatggcctaaatcctgggagtactcaatgcttggctggtcctccagcaccatgccgtttccgaagcgcaggaagtagttggtgtatttgcccaggaaggtcctgctgatgatttcgcattccatgccttccggattcagcgagaattcctcagggcggaccgataccacgaccttctggccctctgtcaccgtgtccacaaggtttgccatctccacatggtatccgccctcaaacacaacggacgacacgctcccctgctttcttatggttccgaaaaagagattggaatggccgataaaggtggatacaaatgcattgtagggccttgcatagatgtcctgggggcttccaatctgctggataatccccagcttcatgaccgcaatcctgtctgatatggcaagggcttcctcctgatcatgggttacgtaaaccgtggtaatacccacctgcttctgcacatcacggatggcgctgcgcatctcaatacgcagcttggcgtccagattggacagcggctcatccatgagaagcacctggggatggatgacaatggccctggccagggccactctctgctgctggccgccggacaggcgctccggcaggcggtcctggtattcgtcgatttttaccaccttaagaatttcatccacccgctccttcatgtgctccttcggcaccttgcggattttcaggccatattccacgttctggcgtaccgtcaggtgggggaagatggcatagctctggaacaccatgccgatgttccgtttctgggccggaatatcgttgatgaccttgtcgtcaaatttgatggttcccccctcgatgctgttaaacccggcaatcatgcgcagcagagtggtcttgccgcacccggagggccccagcagggtaaagaattccccattttttataaaggcggacaagtccggtatgatggtcgtatccccatatttttttactacattgtcgattccaattgaaacactcatacgtttcccctcaattcctctaaaatgaagggggctgacatattaagccacgcccccgatgtatgtaccttcatctgctctttggattggtttactctgtaaacagctccttaaactcatccagccactcagacttgtgtgccgcggtgtctgtctcatcgtcctggataaccttaatctggtccattggaaccatggcgtctcccgcctccacatccttgcggatggttcttctgtactgggtattgttcatgaattcctgaacatccttgctggtgagccagtccacgaacttctgggcatttgattcattggggcagcccttgatgatgtatacgccgtcgccgcggaagataacgccttcactcatataaacggtcttgacaggcgcgcctgcgcccacatactgagcggaaccctgctcaaaggtaagacctacggtgtactctccgtccgcaacgcccttatacactgcggaggaaccgcctaacagcttgccgtccagctgtgcgcagaactgttttacatagtcccagccattgtcaggattgccgccgcccattgcatagagcatgtttaccagatgctcaaaggaggaggaggatgcagccgggtccgcaaaggcaatcttgccctttaattcagggttcagcaggtcctcatatccttcaatcttgatatcgccaatcaggtccgtgttcaccatgataaccgacggaatggtatcaaaacgtgtcaggttgccctctgtgttcttgtattcatcatagaacgcgtcctcgttggatgtggtgtaatccgcaaaatactcgctcttgttttttacggttccgatggttcctgaccagagaatatctgcctgggggttgtcggcttcggtctggattctctttaacgcgtcgccggtacccatggccagacactcagcgtcaatacccgtgtcctcctcgaacatggccagcatggaatcaatcatggactctgtaagggggctgtagattatgagcttctcatccttggaagcgcctgcctcttccttcttctcaccgccgtcctcttcctttcctgtctctgcaccggcctcagccttgggcgcctgggtatccgcgcctttctctgtggcagagcctgaactgcctgaacagccagccaggctgacagccactgccgccgcgcataataccgggattaatcttctttttttcattacctttatcctcctttaaacttggttgaaatagtttatgtactgaatcaataggttcctgcctcctggccgccaagaagcttaagggctgagctggttccaatccgctcacagccttcctccaggaactgctccaggtcctccctggtcttaactcctccggctgccttgattttcacgccttcaccaatgtagcgcttaaacagcctgacatcctcaatcctggctcctgctgttccgaacccggtggaggtcttgatataatcgtcccctccgtccgtgacgcatttgcacagctcccttttctcatcctctgtgagataacatgtctcgatgattaccttcaccacatggtttccggctgcttttttgactgcctcgatttcacgtgtgatctttggaaattcgccgttttttacatcacctaagtttaccaccatatccacttccccggctccgtcagccagagccttctgggtttcgtaaacctttgtctccgtggtattatatcccagcggaaatccgatgaccgtgcatacattcagcttgtccccataggcttttgatacccgtttaacatagcttggagggatacagaccgaagccgtatggttttcaatggcttcctcacagagtgtctgtatctcgtcccaagctgagactgcctttaacagcgtatggtccacatggaccagaatctcttcctttgtcatacccatccccctgtcctctttgtttgtaatcccattatatcgtctcattgccgcctgaaccatccgaaatcctggcaaattatccaatattctgaactcattttatatttttctatatattgtagataattcatgctatgaactatccattggatattatctgatggaatttacactgaaatgtgataagatatagacagaacctgattaaattacagccaggaagcgtctgaaagacccagtcagccctctcccactggcagaaatggaggcatctatgttcggaagaaagaaaaaggcagaagtgtttatgaccaacgacctgggattatacaccaccgtacatcaggccctgaaggccggacagattccctgcgaagtaaaggttgtcaatacaggtacccggaacaggcggaccggcgcactcatcggcagggtaggtgaacggcctgagctggaaatacagtactatatttatacgcccctggaatatgcggacagggccaagtatgtgattgatgaatacaggaaaaatttatcccggtaaccaaggaatccataacgtatcaggggaaggacgtgactcctacaaatcacgtccttcccctgtttacttccatccatatctatagccggccggcttccagtccgctatgcctttaagccatcatcgttcccagccccgtccgtattatccttcatggccatgcgcttttgcgcaagcttccgcatcagtgcgaattcatcataaatactccactcttcccggaacataccgtcttttataatatgctgcgatataccggaaatgaccacgtgggctcctgtggcaggcccatagatgccaaagccctcatgggtgccgattatattccatctggtggcgcaccggtattcgtcccgcttttcatcatagagatagtatacatcctccacctgcatggccagattggggaaagcctggaacagattcagctggtcctgcaggaaatcgcctctgcccaccaattccctgtctgaaggtccatggtatctgtaatcaggggcataattatccttaaactgattgaacattcttctgttataaatctcatgatagctttttctgataaaatactctatatcgctgtaccgcccgttattatctccgaatctgtccggagcaaactcgccgttcagccgttcaatctctccccatgtgccagtgtctgccttggcgctgcctcccttattggctgtggcctccaatactttcatggggtcgtaccccaattgcctgattaggctgatttcgttatataccacccactcctccacaacacggtcgccttttacatagcagttagccactccccataccactaccttcctgccggtaggcggaccatagatggtgtgtcccgtattgtggccaatccaggtccacctcatggaagtatggaagcctccgtttccatcagatgcccagataacatcgtcaatataatccttgatatccggatatccggccagcttcatcacagagtttgcgatgacctgatcccggccgtatgtcacaccatccgatgtatgtaccagggcattatgcttataatggtcatatatcttccccatccccttatcatcccatatgtcataggtatggcggatgataaaatccgcagggtcgcgccattttccaaatccaggcatgggcacttcctgctcccttgccttgccgtccttccacataactgtaatatcatccttcaacggcactgacagctgtcccagggtttcctggtatacattccccctgtagcggatgttcctgtcgcaatcctcttgtttaccgccggtaccggactccttttgcgcccctgaaggctccctcaggatatcttctgcttgtgcagcctgattctttgtgttctttacctcactcatatatcgttctctcctatctctctgttatttcatcaggccaggcagccaggtagacatctgcggtatgaatattacaaatatcagtccaattcccatggtcagtatccatggccagatttcctttactatctcctcaaatggcgctttggatatctgggccgccacaaacaggttgcctcccacaggaggagttatgattcccagtgtggaattaaatataaacatgaccccaaaatggataggatcaatcccatactgtgttgcaatccccagtaaaatggaactcagtatgacattaatggcaataccgtccaagaacgtcccaaggaacaataccaatgcatttaatattataagggccacaatctttgacgaaacgcttcccaatattaatgcagccaattttgtaggtatttcctccagcgtcagtattttaccgaatccagaggacacgcccaggataaacagtattgtacacgtagtaatcacagttttataaaacatctggggcagcattctggcctcaagcccgctgttcctctttaacaggccgtaaatcaggccgtaaaccaccgataccacagctgcctctgtaggcgtaaaaatcccggaatagataccccctaaaatgatgaccggcataatcaggctgaatttcgcctcccacatggtcctcagtttccggcgcaaaggaatgggatcgtttcctgaacagatattatgctttttgccgtaaatatggcaatataccaggaaacagcagccaatgaataatcccggcagaatctctgccgtaaacagcttggagatagacacattgttcaggctcccgaatacaaccagtcccatgctgggaggaatcatctggccgcagcagcctgccgtggcaatgagtgccgccgccgctccctggctcagcccctgctttcgcagctccggcagggcaatcaggccaatggcagctatggtggcataggcagaaccggagattgcgccaaaggccatgcaggccagaaccgttaccatcatgattccgcccttcagcctgcccacccatacattagcggctttaaacaaaccttctgagattcctgcctctgacataatctgtccggccagcacaaaaaagggaaccgctgtcagtgtaaaggaatcaacactgttggccatggcgcgcacaaaataggacagggatatgatattgcttgtaaaaacagagcccaataccccaatgcctatggcaaagccaatgggtactcccaagaaagccagtcccaggaacagtacaaacaaaacagcaactgacatcacgctccccccttttcttcctcaattttgtccgcctcaattcccccctggcgaatctgtcccgcaatctttaccgtacactggaccagccttagacacaccagcagaaatcccaggggcataacaagataaaggagccacattggtatgggcagggacacggcggtctgccctccctggcggatgatactcaacaatttatatccttcaatcatacagataacggaaaaaccaaaacataagatgttacataaaatatccagatacagtctcaggcccggcctgagtaaggaacgcacaaatgttatccttatatgttcccctgtctttaccgcataccctatggagatgaacaccatccatacaaacatgtacctggtcatctcttctgtccatggaaacggagttgaaaacaggtaccgccccactatctgaagtgttgtaaaaacaaccataagggccaggaacacagcgcctataaaaacttccagcttgtcgtccacccattgaatcacttttttcacgctctttttcacatccttccatccttataaagcagtcatcagttcctgaatgtctccagtatctctttgccgcacatttcttccactttaggctcggtcgccgccaccatagcttccttgatttccgccctggcctcatcggtcagctccgtatagagaatcttgccttgttcctgaagctctttaatcttctgtacggaatcctcctcctccttcatggcaatcttccactcctcctctgctgccccggcgattgccttatcatatgcagctctctgttcttcagaaaaagaattatatttggcggaagagatcagtattacattgatggaataactgtgattggtatcggttgcgtacttcagtacatctataagtccctgctggatgataggcatttttgatgaaaccagaccgtctaccgtgccttgctgaagacctgtatacagctcattccatgccataggtgtagggatacatcccagtgcttccagctccgcaatgttaatgggattctccggcgccctgctcttaattccctggaaatccgccagagtgttcacttctcttacattattccagaatatccttcctgagcttccaaagaaagcagccactttgacgcccatatttttatcgtcagcagcctttttcagcaaatccccctgctctccgtccagcttcgccttggcatcctttaaatcatcgaacaggtagtccgcgttaaatacataaaactccttaatatttggcgcaaactgtagctctgccacagaagtcatatcaatctctcccagggtaacggcctcgatactgtcgcggtcggatcccactacctgcgcattaggaaatattttgacctcaattcccacgtcctccccttcaataatttccttaaacttcagaaaaccctgatgggtggcctctttttcatttgcctgatgggcaattctgatttccagcttggatgattcagcgccggacggcgagggagcgtcttccccgcttccctgctcttgctttgcagcagctggtttctctgtaccgcagcccgttaacgcgagagctaatcctaccagactgattgttataacctttttcattgtttttttcattttaaacccctttctccatcaacacatttacgattatttgcttcactgattccccaattaccggtttgaccttcccttatccctcccttcccatcaggtttaatcagaatatatctgcggaaaatgaatacgtagtcattttcctgtaaaataaatgattgacatttaatgtctgtcaatcatccatttgttctaatgacggacagtattcctcacaatcagctgcataggaaccgctaccgtctctgggggcatctccggattctccatattctctatcaggacccggacagcctctttgcacagaatgtcattctgctgctgcagtacagtgagggaatacgaccttaaagatgccgcaaacgtatcatctaatcccataatagaataatcttcacccggcacatacttatactttaaccgtccgcagtccatgactcccagagccatcaggtcattggcgcagaagattgcctccacaggcagtcccgaggcaaatatacggtcgccggcccgatagccggactcatacgaataatcgcctgcctgtatcatacactgagttataccgcattgtttaaggccgcccagaaaaccttcctggcgctcatcgtgattcagataacagctttcctccgcggaaacatatgcaaattcccgcatccctaatccatacaaaaatctcgccgccctctccccggccccgtaattgtcggaatataccatattaatatccgtattaggactgtatacattgagaaggacaagaggtattcccttctttttccactccccggatatcttatgggtcagggccgatgaggtgatgatgataccgtccacacagtactccaaaagccgtctgagtatctgattgatgtcactgtccggagccgtgttgaacaccattactctcagcccatattcctggagaagattggtaaggatattaagcaggccatagtagtacacgttatatgtatcagacaacacaactccgattatcccggtccggttggagttaaggcctctggccagtgcattgggactatatccaagctcttcagcagccttcagcaccttttccctggtcttatggcttatcctgtcattccacttttcattaaagaccctggatacagaagactgggataccccggctctctttgccacatcaaacgaagaaatgctttttatcattcttttatctatcatataaccacctataccgcgattgattacgtcgtcatattttatgactacgcaatcatttatatcttatatatacactccccgtttaataatgtcaatattaaattttattttttacatttttttgtctacatttcacatatcaaaccgccaaaaattagcggtttttttgtttttctttttcccaggcttctaacttctccatccagactcatatttttaataaacgctccacatccgcttcgattcccaggcagtcatccgctgcctccatgccgtactccactaccaggtcagcctgaggggtatattccccggcccatgccatgaagctgtcaaaatccagggttccgtccccaatccgtctgtggctgtcgtgaactccgtcattattgtgaagatggtatgccagaatctgccctttcaggcgttccataacgctgcgcaggtcccagccattggcatgggcatggccgatgtctatgagcaccgggtatccttccgcccggcacagggagacaaagccgctctcatctaacagcatattgttccggtccatgacccccgcattctccacggccaccggtattcccaggggacgaaacagttcctccaccctgcggtaattggcgcaggaatcccgcagcatcctctcctcatccctgacagcacagttgttgtgatgaaaaaccatatagcggctgttaagcctctctgagtagcggagggtctggcccaccagttccatggtgtactcatactccggggttccctggggcgccgagtgctccgccttgtaataggggccgtgaaagctgatgggaacatgttttaacatgtccatgctctcctcaaggagagaggcgaatgcctgccggtggaacatgggaaatacttccactcccacctgtcccttccatttttccacataggacagaatccgcttaaactcctccgccttatacatattggtactgatgagcaaagccatggccgttctctcccttcttactggcacctttttggagtatatacggctccctggcagcccttagctgctccggatagcccagggacacctgggtagccctgtcaaagagatggattctgtcaaaatccggctggatatatacgctctctcccggagcagggacatccccctcgcttacagcaatcatttccatattgtccacctgcacatatacgccgtaccggttgccgtaatcctccacgtacttgacggttccctccagggtattttcctggcgcctgcggtgcaaaatcatgtgctccgggcgtattcccaggaacagacggccggattcgttgcgggaggccaatcctgaccacatgtccggcagccagaccacctgtctgccgatcaccagcgttcccctggtataggatgcctccacaatattcatggagggggatccgatgaattttgcagtaaatacattggcggggcggttgtatacattggcaggggtgtccagcatctgcattttcccctcatgcatcagggctattcgctgtcccacggtcatggcctcaatctggtcatgggtcacataaataagggtctgatggtacatctcatggattttcaccagctccttcctggcccgcagcctcagctgggcatccaggttggaaagcggttcgtctaaaaggaaataatccgagcgcttcaccactgccctggccagcgccaccctctggcgctggccgccggaaagatcctttggcctgcgctcctccagccctttcaggtccagcatatccagaacctccgaaagcctggtctttatctccgcgggatccattttgtgggcctttaggccgtaaacgatattgctttgcaccgtcatatgaggaaacagggcatagttttgaaataccatggacacattcctctccccgcagggaacatcgtttaccagacggccgtccatatagagatttcccccgctgagcctctccaggcccgcaatcatccgcagggtggtggatttgccgcagccggaaggtcccagcagaatcaggcgctctccttccctgatttccatgtttaaatcctttacgattacatttttgtcataagctttcactacatggtcaaatactatgtttttcattgatttctccttatttgattcccttggccgccaactccctaacccttgattcccgacatggcaaaggtattgatgatatagcgctggaacaggatatacaatgccagcggaatcaccatggtcatgacagaaacagccattgctatggtaaactccgttcccccctccgcgcttatgtacatctgcagggccagggacagggtataattctccttgcttttcagtataagaacaggccacacatactcgttccaggaattgatgaaaaagatgattcccgtggaaatgatggagggccgtactaacgggatgatgatatccctcatgatcttcagattcttcacattctccatcctggccgcctcgataagagccctggggattccccgcatggactggcgcaggagaaagattcccagcacatcggccagctggggcagggccacgccccatatcttgtcgctgaggccgattttggaaatcatcagatagttgggaatcatggtaacggtaaacggtatgaacatggtggccagcatgataaagtacaggattcccttgcccctaaaatcaaaatacacaaaggaataggctgcaaacaggctggtaacggtcttaaaaacagttacagtggcagcaattaaaaaggtattcatggtaattcttaagaaggggagcttactgaatacatggatgtaattctgcaccgtgggcctggccggaataatctgaaacaccgtattaaaggcatcctgcatggtcttaaaggaatttgacaccgcaaatacaatgggcatcaggataaggaacacagcacacagaagaagcaggtgccatcccggctgcatttctttaattttcatagtatacccccttttccacaaaccggaattccagaagcagcagtacaataaacagcaccatggtaatcactgaaacagctgatgatgtgcctgtgcggtacagggtaaatgcctcatggtaggacatgtatatcaggttggagctggcgtagttgggaccgccctgggttaccaccttgatgggtgtaaacacatactgaagcccctgtacaatggtggtgataaacacgtagattccagtggccgagctcataggaaccaccatgtcgcggaagattttccacaggggaatattgtccagtctggccgcctcaacgacctcctgggataccccggacacacctgccagtatgatgataaaattatagccgaacaccttccaggaggtgattatgctcagtacagcaatgacccacccctcggccttggaccagaagggaagggccaggccaaagtactttaacacaagggccacagggccggaaatggggttcagaatccagatataaagaatggatcccaccaccagggatatgacgctgggcaggaaaaacacagctttataaaagccctgtgccctcttaatcaccgctgacaggatgaaggaaaggatgtagggcagcataaaattcagaaccagcagtacaaggatatacaccgccgtatttcccgcaatcttccaggaattcgggtccctgaaaatggctgcatagttagccagccccacaaactttttcaccggttttaccatattccactcaaaaaaactgagatagaccgtataaaacaggggataaaacatgaataccgcaaacacagccagcgatggcacaagaaacagatatcccagcagcgtctgctttttttcttcctgattcaatctgattttacctccataaaggggcaggtatccccatgtccccggggatacccgctccaatctattgtaagcagctgtatttcagccggttactgtactgccagcagctggttgatggcatcctgtgctgccttcatgccctgttctgccgtcacctgcccgcccagaatctggtccctcatgtctaagagcatctgctctgcctgcaggccggcgtctcccggaaacgctgtccacggaaccactccgtccatctgctggatggctgcgttcatcatcttgttctctgccaggaatgtcttaagcccgttctcagccccggccacatcctttctgggaggcacataaccggttccctctgtccaggctgccatggactccacgctgtagagaaacttctcaaattcccatgccgcctcaatctggtcatcgccctgagccgtaatagccaggaagcatcctcctgccggaaccatgcgctccttgtctttccacaggggggattttacggttgccacgtcaaactgcgcgcccttctgcacggaagcccttctggcaatggtggtgtataacatggcgcagttaccgtcaataaagctctggcacccttcctcccaggagatatgtaaagcggtctggtccttcaccatatcagctatcagctgcatggcttcaattccatcctccgtggcaaaggaggcctcttttttgccctccgcgttggtggtcagcatcttagcgccgctgctttcaatcagtccctgctgtgcccagaaatccgcgggctcctgcatataaaaaccgtactttcctgtcttttccttgatggtctttgcaaactcgctgacctcctgccaggtagccgggccgtcctccgcaagtcctgcctcccttaagatgtccttgttgatgtagagaaccggattactcagggaataggggatgcccacctgggaaccctggctgtttacagccagctcaaggacattgggaagaaatttgtcctgaaggaaacccgcatcctccttgtcaaacctgtctatggcttcctgaggggacacataggaaaagttattggaaaaataatccagaaatgcccagccaatctgcaccaacgccggagaattgcctgctgccgcctctgcctggaggttctgcatcagtcccttatacatgtccgggttgtattttgccactacctggatgtggtcgttgctttcgttaaactgcttaaccagctcgtctaccaccaatcctccctgtgtttccgcattacagtgccagtattcgattactgttttttctccggaggagctgtttcccccggtcccggaccctgtaccggtatctgtactggtatctgtattagtgtctgtgccggcctctgccccgcttccggtctggtttaccgctgctgtgccggtctgcgcattggctgcacccgcgttatcccgggctttgctgcctgacgctgcaccgcagccggataaaactgccattgaagctgacactgaaactgccatggccaatgccatcaaagattttacacttcttctcattactccatttcctcctaatcattccgttgtatgttttatcttaaagattgaatgtaaattccggaagataaaatctgtaaaatctttgcaaggaattggaaaagtacaaaaataaagcacggacctaatcttttgtccgtgctttcatccatacatatactgtatcaatttatccgcccgccgtaggggcatgccttaaattcctgaatccgggccatccatctacaatgtgactccctgcttaaagatagccaaatcatgaaaaccggcttcctctgacttaaccttttccccggaagccaccctgagaacatattggaacaattccatggccacctggtccttcgtttttgtctccaccatttcgccggcattaaaatcgatccatcctgccttgtatccggccagctttgaattggaggaaatcttcatggtgggaaccagagtcgcaaagggcgtgccccttcccgttgtaaaaaggacaatctgggcgccggatactgccagggccgtggccgctaccaggtcattgcccggagcggacagcaggttaaggcccttctccctgacgcgttcgccgtactccagcacaccgcacactggtgaggaaccggacttctgggtgcagccaagagacttatcctccagggtggagatacccccctttttattgcccggggatggattttcatagatagtctggttgtggctggtgaaatattccttgaagccattgatgagcttcacagtcctggcaaatgtctcctcatcccggcaccggttcatcagaatggtttcagcgccaaacatctccggcacctcggtgagaatcgtggtcccgcccttggatataagtatatcggaaaatgcacccaccgccggattggccgtgattcccgacagcccgtcggagccgccgcacttcatgccgatgatcagctgagacgcgtcacattccaccctgacatccccggaagccttctcatacagctgtcccagaagctccatggcagcttccatctcatcctcacagtcctggcattgcaggaatttcacccgttccgggtcatattcaccgatatagtccatcagaaccggtatattgcagttttcacagcccagtcccagaaccagcacaccgcccgcgttgggatgatggatgatgtcggccagcaccttcctggtattctcctgatcctcccccatctgggagcatccgtagggatgggcaaacgccacgatatcctccacgtttcccagcataaaacgacgctttgcctcctgctccattgccctggccactgaattcacgcagcctacggtgggaagaatccacagttcattgcgcactccgcatcctccgttcccccgtttatatcccataaagctggatggggatgacttgggaagttcctttatctgaggctcgtattgatactccagcacatcgcccagggcagtgcgtacattatggatatgcacccagtccccgggattaatctgccgggaggcatatccgatgcggcagccgtatttgaccacgggcgcgccctccggtatttggcagactgcaaacttatgtccctggggaatatcctcatttaaaaccactgtatatgggtctgccgcaactgtacttcctttggacagcggctttaacgccaccgccaccgtatcttccctgttgatttttataaactcctgcatataactcttcctccgggcccgcacatatcatttatgcctgacaggcatctactccgattcactcagaaccgcgtcgtacgccttgtccataccttctgtctcaatcaattcataccacttctttacatcagcgagaagggggcttaaatcctgtccccagtaatcttccctctttaaaatatcctccaccggagctgttttcatgaaatccatgatttcctggctgtcattggcatcatcggtgcggtaaaatgccatgagagctgccagagaaaaagtaagcccctggggacaagaaccaaacatatccctgtattccagtatggtgggaagcacccttgcccggaatttggacacagagttaagcgcaatagagaggagcatatgcctgataaaggggttggagaaccgttccagcactgcctctccgaatttccggttatcttctgtatcgccaatggccggtataatttccctgaagatgcatttgcgcaagagggcggacaccttttcatccttcaggcactctcccaccgtcttaagtccgtataaatgggctcccagcaccatggaggtatgggctccgttcaggatacgcaccttcctctttttatacgggtccacattgtcggtccagaccacatgaaaacctgccttttgtaacggaagctcatcctcatggcttccctggatgacccacaggtggaatatctcagccgtatccatcatattgtcctgttcgccaatcctccggcagagctcctcatgctcatccctgggaaatccggtgacaatgcggtccaccagtgtggaacagaaatcattttcccgtacaagccatgtctcaaattcctctcccagctcccactgttttgcgtaacggagacagcatttttccagctcctcgccgttgtggtcaatcagctcacaggagagaataatgaaacctttaagccccagccggaaccgcttatataaaagctgggtcagcttgccgggaaatgacctggccggcgcatctgtaaattggttggaatccacatactcgattcccgcttccgtggtattggacacaataaagcggaaatccgggttctcggccagcttcatgtaggcttcaaaatcatcatagggattcacgcacctggatatgatgtcaatatgggtgtgctcatccaccacctgcccgttatcaatgcctctgaggaacaggttgtactcacatccctgctgctccagtacgctgcacatccctttttcaatcggctggactatgaccacagagccgtcaaacagccctttgtcctgcatcttctggaaaaaatagtctgcaaagcctctgaggaatccgccttcgccaaattggattactgtttcttttcttgccatgatacacctccatctttatgtttacaaggaatggataccccgttgtctgcagcggggtatccaactcatattgttaactattaccacaggttgccgtcctcatcaaaaggaagatactcaggttcgctttcaatcgtgatgccgggatgattcctgacttcatcataataagcctctgacagcatgatatgttccaggtgcaggctgttgggaatccggacgattctcggattctttttatcaatttcattgcaggtgcggacgcatacctgtatggcttccttatcactttccatgacaatggggattcggaccccgccaaggacagtacaagttattgcgtttggatacatggaagccaggtccagctggttaaacacccgttttgtagttgcgctggaatatccaagaccgattccgtttccatgggtttcggggctcaaatccagtacacacaccctttgggcattgataccgccagatgcatagggtgtacagaacgtacccgtaatattcgggtccatgccatcaccgctgaaattcttgccaatctggtccacaaccagtacgtcacaggaatccaccagtattctgggcatgtaggtaaatgcctctttgagaaggggcggctctttctccactatgtcctctgcctggaccgccgctatcttacaggtctcatcaaaggcattttctatcactgccactgcaaacagtacaggtgcattctctatgattgcttttccaaacatcggcacatactttgccatgtttttaaagcccgcctcatggcacacctcagccccatgctgttttccaagtccaatggccatcattttcatgataccgctttcatatggtcccctgaaggctgtatggggttttatcctgcagctgacaatgatgccgtccgcttccgcggcatatttgtcaatgaacacatccatgccttcctcattgacgcctatcttttttacttccatggatgagagaatcgggcatcccagataagactcagtgatgccgtaactctccaggacatctttttgtccctctgccgtagctcccccatggcttcccatggcgggaaccacaaagggctctgctcccctggatttaacatagtccgcaattgtctttgtgaccagggccacgtttgcaattcccctggatcctgccgtaatggcaatcctcatacccggcctgactttcgctgcaaaactctcctcggacaggtatccccgtataattcccggtatatcctccggctcaatcctgggccgtggaaacgtctgtcttactttaaacattttaggcaaatcctggctgctcaccaggtccgctacaaattggcgttctctcattttccgcaacactccttatccggcattaataaaatacatttacaaggaacgtagtcaactgtggaatatatgtcagcacaataatatcaattgcaaacaggatataaaatggaactgcttcctttatgaaatcctttgtaggacacttggtaataccgcagcttacaaacatcagtgttcccatgggaggtgtaaatgctcctattgtacagttaaaaatatagaccatggcaaaatggatatcatcaattccataagccattgcaaccggatgcagaagaggtgccagcacgatcatggatgcgtttccttcgataaacataccaacgatcaaaaggaagatattgaccataatcaggaatacatacttattatggatattgcttatcatccactgtgaaaactgctgcggtatctgctcctttgtgagaatccatgaaaaacaggtggcggcagctacaataagcatgatagacgccgttgtcgttactgtttccttgcacccctgcatcacgtttttaagtgtcagttctttatacagaagtcccagcagcaccgcatatacgattgccacagttcccgcctcggaagcagtaaaaacgccaatccttaccccgccgataataatgatcggcaaaagcaatggaagaaatgcaggcctgacagctgctattttttcagaaacaggaatcttagtggtcctgcttggcaggtatcctctctttttggacaaaaagtgtgtaaatatcatcaatgtcacacagagaacaattccgggcccgattcccgctatgaacagtttgccgattgatatgttattgatacagccatagataatcagccctactcccggaggaatcagcggaaccaccatgccggatgcggctgtgatgacggttgaaaatgactttgaatatccctttgactccatggttggaaccagcatcttacactgcatggccgcgtctgccaggctggatccggacaagcctcccatgagagtggagagcaggatgttgacctgcgccagtcctccgggcatcctggctgtcagcacttcacagcagttcataatgcgcttggtgacgcccgtataattcataaatatgcctgcacatacaaaaaaggggattgccaggagagagagtccctctgcgccgcttatggtcttctgggcaaatatggagagattcattccgggcgttcctataaagtaaacggctgacgctgataaaaccgcaatatacaccggtaccttcaggaaaaggagtaccagcaagagaattgcgcatatgataaccagattattcatcttcgtcctcctctaccaatttttctacttcatcctcgtaaccaaacacattgacaagaaaatagttaaatatctgaagcatacaggaaaccggtacaattatataaatccaggtaaacggtaagttgagcaccgctgttgtccttcctgtacgcatgaaaagctgaagataaccaatgcttgtatagcacaggaatcccagtaccgctgtcaccaccagcccgataaaaatactcacgattttgcggaccggttttggaaatatctcatataagatttctattgccgaatggtttcctgtacggtaagccgcacctcctgctgcaaatacgacccatacaatgaacgcagcctgtatttcctctatccatccgaatggttttccaaccacatagcgggcgataacgcccgcaaatgtgcatcctacaagaataaccagtgcaatagaagcaatcactatatccagattaatcagaatcttaaaaagcttgctgtcttttttcattccatgctcctatctgtagtcagaactgtttattttgctgcttcctttactgtgtcgtacagtccgtcactccagccaagggtttcgcctgcgatatcatagaatggctgtcctgcctcaatccattttgccttctgctcgtctgtcagggtagtgatggtcacgcctgcatccagcagtttctgccttgcatcttcctctgctgcttcctgtaattcattattgtacagtcctgcctcgtctgctgcctctgtaaggatcttctgctggtcagctgtcaggctctggaaaaacgtatctccgcaaatccacatggatgtggccagtatatgctcatcctctaccagatacttggcaacctcctggaagcttctgttggcaagaggagtgattgggttttccacagcgtcaatggtctttgcctgcagtgcctggtaaacatcgcccatatccatacccacagaggatgctcccagggaattaaaactgctgatggaaagatcgttggatgaaactctcagcttcaggcctgccaggtcttccggaagcgtcaccggttttacggaaagaatatttctggctccatatacccagttggatgacagaacgcggatggaagccttctgtgccagctcatcgcacagtcccctgtaccagtcgctgtcaatggctgaccactcctcatcccaggtatcaaacatgaacggcgcatagaaaattccaaagtccggtactccgtaatccgcaagaaacgcaccatctgccactgtaatcatgggctcgcccagaatcatctggtcaatcagttctgtcttcttgcccaatgcagagtttgggaaaagttccatcttgatggttccgttactcttagactcaaccagttccttccatttctcaacagcctttgctgccggctcagaagtggcgttctcatagccaacctgaatcgtaaccacatcgcctgctgccggctctgtatctgcatctgcctgtgctgccgttgtatcggttgctgaatcggctgccgccgcactctctgtggtgcctgccgctgtagtggccccagtacttccgcctccacatgctgtcaagctggctgctgccaatactcctgccattgtaagtgctgctaatctgttaaatctcataatcttaccctccatatattaatattttttgttacctttaccttttgtgtcttatctgtctgtaaagtccaggattaccttcagcatatttcccgggttgttagcaaaatcattgaatgctttggccccatcctcaaatttatatatattggtaataattccctttaccggtacctttccttccttgaccaggtcaatcagctccacaaaatctttcttaagagcattccttgaaccaaatacattaagttcttttttctggagcagtgtaaaattgaaatccaggtttttctttcctactccgatgacaaccacctttcccccaaaacaggccgcgtcaatgcagttctggaatgtggatggaagtcctaccgcctcaatggcaatatcaaacccgttcccgtctgtaatctccttcaccgctttgtcaaagccctccggggaatcattaaggatgatgccatccacgccgaactccctggccatgtccagttttcccatggacacatcggatatgtaaaccactgccccctttgccttggctgccaccgcagccagaacgccgatggtaccggctcctatgaccagaaccttgtctcccggctttacctctgccctgctgacaccatgatagctgatgcagaaaggctcaatggctgcaagaagcatgggatccaatccctttccgtcatacacacgctcctcaggcatggttatatactcctgaaacgccccgtctctctggcatcccatggtctggttatccatacatgcattcacgattccatgctcgcaggaataacagtgtccgcagttaaaatatggattgcaggttacaatcattcccgggcgaaggccctgtccattgtcctcatccacctccacaatttccgcagaaaactcatggcctggtatccttggataatcgaagtatgcgaaagtccccttgtaggaacccagatcgcttccacagattcccccatacaggagtttcagcagaacctcacctttttgcctaaccggtttgtcgatatccctgaactctacctgaccgggtgcattaatatacattgctttcattaatcttcctcccagctgagatatattctttgttgtatacatcatagtatatattaatgaatacatcatgtcaactgattttctgaccgtgttttatattttgtatataatgaccgattttattccatatttttatgcaatataactattgttcaaccattttatttcacccccttattgaaccggcgcgatatctatgataaaatactttcatatatattaaaagagggggggtatgttcatcatggttaaaaccaatctgaaaaccttggcatacaacacaatcaagcaaaaaatcgtcacctgtgaatatgcgccggggacatttttaaatgaggaaatactgactgatgaattaaagataagcagaacacccatccgtgatgccttaagcaggctggagcaggagggccttattgagataaaaccaaaaaaaggaatcaccgtaaccgccctgtccattaaggatgtgaacatgatttttgagatacggaaattatatgagccttatattctgaaaaattacggttcatttctggacgaggacaagctgaacgaattctatcacattttttcccataaggacgcaaacagcgagtgcttccagaacaacaattacttttatgacttagactcctccttccaccaaatgattatggacgcctgtcctaacatttacctgcgccagaattacgcactgatacagacccagagcgagcgtttccgcttcatgacaggcaatatctccaacaaccgtctggaggataccttcagagaacacatcgacatcattatcccctgcctgcaaaaagactgggatactgcggtagaaaagctattgtatcatctggatgagtctaagaggtctactttcaagctggtatttgacagtattgacagtaataatattgggttctgattgggtttggatgtaaatgaggcggaggggcatccatccgtgagcgggatgggggcgggggaggcggatgctggctgcggagcgggtatcactaaggccgcggaaatcggctttaaacaagattcaggcgacccaactcgcgctttagatactgccaggaatccaggtactgagctcagacaagggtacgcctgaatcttaaagccgcttcccacagcctaagtgataccaacgctcctgtagatgcatccgcctcccccgcccccatcccactcacccgcaacgtatcgtcccgcctgcatcatttatatcaaaatcaggtaaaaaaagaaaaatggcatgccagggatattggcataccaaacaatatacaggacaatataaaaggccgcattatcttgatttcatcctgatatgcggccctctggctgagtattatctgtctaaatgttaatctaaatacaggcaaccactttccgattccccagtatcatcagccagagatcctttttctatacctatgcggggaagagacagcggacgctctggaaatgtagtgggtgagaggcgggaacgcagggcgggaggcggttttggagcagttcggagagacttaggcccaagaggcgggaaaagccggggttgcgcagggcgctccacgcccggagcaaagcaaagatggagccgaactcatcaggagttcggcgtaatttttgcggtccccgggttttcccggcccttgggccttagtctctcccactgcggaaaccgccgcctcccgggctgcgttcccgccgctcacggacgcagcccccccaaagcgcgtccgcgtaccctaccccaacctatgtataaacagcccgctccgcagcttcggctcaaaccaggttgacttaggaggcatgagaagccctgcatcggccactgctaacagctcctctatggaagtgggatacatggagaacgcagcttccatatcctcggataccctgcgctccagctcctttaatcccctgattccgccgatgaaatcaatgcgtttatccgttctgggatcacctacccccagaaccggacccaaaagctggtcctgaagaatggacacatccagtcccttcaccggatcgctgctctgaaactccggcttcaccctgagacagtaccatctgccgccgagaaacatgccgaatgttcccttttccctgggccagaaggcgtctgcccccggttccccgcagccaggatccccccatgcagccacatcaaaccgctcagccacagcagccagaaaatcctcctgtcccaatccgttcaaatcctttaccacccggttatagggcagtatcttaagctcctcgtccgggaacagtacggccaggaaataattgaagggttccttccccgtataatccgggttctcttcccttctcttaagccccaccttcacagcggaggcagccctgtggtggccgtctgcaatataagtgcccggtatggctgcaaaagcagcctccacggcctccaccatgcttctggcgccaatcatccacaccctgtggcggattgcgtcctccgacacaaaatcatacagaggcgcctcctcctttacctgggccaccagggccttaagctcctgattctgtctgtaggccaggaaaatagggcccgtatgggcgttggtggcatccacatggcggatacggtccagctccttatcctccctggtattctcatgtttcttcaccacgccgttcacatagtcgtcaatggaacagcagaccacaataccggtctggctccttccctccatggtgagttcatagaggtaataattctcctcagggtcagtcacatagaccccttcctcaatctgacaatcaagcagctccctggccttgtcatagacacggctgtcataggtatccacatcatccccaaactgagtctcagcccggtcaatgttcaggaaggaaaggggattgcccttaacggcctggcaggcttcctttctgttatacacatcatagggcagggccgccacccgggccgccttgtccgccgcgggcctgatacacataaatggttttactactgccatagtttctctcctgtttatctaaggttacagtccgtccacggaaacgggcagttacttaaccacccgcaccctcagcacacctttgatggccctgagcttctgaatagtggaatcctctgccttgtgctccaaatccagcagcgtgtaggcatacttatcccggctcttattggtcatgtcggaaatgttcatgccctgttcggccaatatagctgtaatctgtccaatcatgttgggaatgttcatatgaagcacggccacacggctctctgcctggcacatgcccatgtcgcaggacggaaaattaacggagtttttaatatttccattctccaggtaatctgtcagctccttcacagccatcaccgcgcagttgtcctcggactcctttgtggaagcgcccagatggggaagcaggatgaccctctccatgtttgcaacctttggattggggaaatcgctgacatagtagcgcacctttcctgcatccagcgcttccgccatatcatcgtcattgaccagggtgtccctggagaagttgaggattaccaccccatccttcatgatagccagtttttctttgttgatcattcccctggtggaatccataagaggcacatggatggtgatataatcacattcctggaaaatgatgtccgcgttggtgatatgctttacattcctggacagtctccaggccgcgttgatggaaatatacgggtcgtatccgtatacctccattcccagatgggtggctgcgttggcaacctccgccccgatggcgcccaggccgataactcccagcttcttgcccttaatctcgcagccagcaaatgccttcttgctcttctctgtatccttggtgatgttgtcatcctccgcattggccttgcaccactcgataccgcccacgatatcccgggatgccatgagcatgcctgcgatcaccagctcctttacgccgttggcattggctcccggtgtattaaatacaacgatgcccttctgggcgcaggagtccagaggaatattgttgacacctgctcccgcacggcccactgccagcaggttctcaggaagttccatatcatgcatggaagcactgcgcaccaggacggcgtcagcatcagctgccttgtctgtcatctcatatccggccggaaacagctccgtaccgcactttgcaatggggttcaagcaatgaatttttttcataataatccaactctcctcttatatgtccaaagacttttatttcctgtgcttcttctcgaagtcagccataaattccaccagtttcccaacaccctccgcaggcattgcattgtaaatgctggcgcgcatgccgcccacggttctgtgtcctttcagattctcaaagcccgctgcctttgactccttcacaaacagggcgtccagttcctcgtcccctgtcacgaagggcacgttcatcagtgagcggtccttcttaaccacagtacccttaaataactggctttcatccaggaaattatagaggatctcagccttcttttcgttgtattccttcatggcttccaggccgcctctggccttcagccacttaaatacctttccgcacatgtatatgccgtatgtaggcggggtattgtacagtgactctgcgtctgcatgggtcttataacggagcatggtaggtgttccgggcagcacatcctctgtcaccaggtcctccctcacaatgacaatgacggttcccgccggtcccacgttcttctgggcgcctgcaaagatcaggccgtactttgtcacatccactggctcggacagaaagcatgaggactggtcagctaccagaagctttccctttgtgttgggaagggtccagtacttggtgccgtaaatggtgttgttctcacagatatacacataatccgcgtcctcggaaacaggcaggtcggagcaatccggaatatagctgaaggtcttgtcagcgctggacgcaatggcattggcctttccgtaaatggcgccttcctgatatgccttcttagcccactgtccggtaaggatgtaatctgccgccttgttcttcatcaggttcatgggcaccatggcaaactgctgggatgcgcccccctgaagaaacagcaccttataattatccggaatatgtaaaagatcccgcaggtctgattcagcttccttgatgatggtgtcataagccttagatcgatgactcatctccatcactgacattcctgttcccctgtaatccagcatctctgccgcggcttctttcaggacgtcctccggcaaaacggccggtccggctgaaaaattgtaaactctgctcatcttgttctcctcctttaaatggttgtacttgctgcacatatcctctttaatatatatacacagaggactcctccatatgcggaacccggcacaatacaatgccataccgcatacagagaagtcgcctgactgtatactccatcgtatatctgtcccacctgtcccggcttgcattctgtcgctttatcgtgctaatctgataacgcagccaagatattaaagactactatacactgtttttaattaattttcaagtctgtatcgtcaaaagcatctgcaataggcgctcccggtgataccatggggaataccttgtcatcgcagctgatctgacagtcaatgaccacaggaatgtttaaggaaatggcttcccggagcaccggctccagctcctccttctgcgtcacacggtaggccctggcccccatggcctctgctatcttcacaaaatccacggaatcattcagtatggtctgggaatagcgcttgccgtagaacagggtctgccactggcgtaccatgcccagcacatggttattcacgataacctccaccacagggatattataccgggttgccgtggcaatctcgttcatgttcatgcggaaacagccgtcgcctgcaatattgataaccgtcttatccctgcatcccatctttgcgcctatagcggcacccaggccgtaacccatggttcccagtcctcccgaagtgagaagggtgcggggctggcggtactggtagtactgggccgcccacatctggtgctgtcccacctcagtgactatgacagcgtccccgcccgtcacctcgttgatggtctggacgatgaaaggacctgtcagcaggttcttgtcatagcgcagggggtacatatccttcatgcgctctatgtgggctatccactcgtcgtggttcaccgggtccagcctggcattcagcttgcgcaggatgaccttcacatccccgatgatgctggcgtccaccttaatattcttgttaatctctgccgggtcgatgtccagctggagaatctttgcattctttgcaaacttggacgcattgccggtcacgcggtcgctgaacctggcgcccaccacaatcagcaggtcggcctcggttatgccgaagttggaggttttggtgccgtgcatgcccaccatacccgtgtacagctcgtcagctccgtcaaacgcgccctttcccataagactgtccgctaccggcgcctgaatcttatgggcaaatgccctcagctcgtcggacgcattggccagcacagcgccgccgcccacaaagataaacggctttgacgctttgcggatcatctccacagcccggtccatgtcctgctctgtaatggtatcgctctggcgcacgatttcctccggaacctgcttctcatattcgcagggcgcagccgtcacgtccttggtgatatccaccagcacagggccggggcggcctgtctgggcaatggtaaatgcccttcggataaccgttgccagacggtttacatccttaacaatgaaattatattttgtaatgggcatggtcacgcccgtaatgtcgatttcctggaaactgtccttgcccagcagactgttggtcacgttgcaggtaatggccaccaccggcacggaatccatataagcagtggcaatgcctgttaccagattggtggcgcccggaccggatgtggccaggcacacacccaccctgccggtggcccttgcgtagccgtcagccgcatgggaagctccctgctcatgggatgtcaggatatgggtaatctcatcctggtgctggtacaatgcatcatatatattcaggatagcgccgcccggataaccaaatacggtgtccacgccctgttccttcaaacactcaactacaatctctgcccccgtcaatttgctcatatactgcactccttttcttcatgttatttcatgatgccccgataatcattttacctgcagcacagctcccctgtcagcggaagtaaccagggacgcgtatctggccagatatcctgtggtaacctgcggtgtgcggggctgccacttggccttcctggcttccatctcctggtcagataccagcacgttcagctcatggttgtcaatatcaatggaaataatatccccctcttccaccagggcaatggggcctcccactgctgcctcaggtgaggcgtggccgatggaagcgcctctggaggcgccggagaaacgtccgtctgtaatcagggccaccgtggagcccagtcccataccggcaatggcagaggtagggttgagcatctccctcatgcccggacctcccttaggtccttcatagcggataaccaccacgtctccggctacaatcctgccgttcttgatggcatcaatggcatcctcctcgcagtcaaataccctggccggtccctcatgctttaacatctcaggcgcaacagcggagcgcttcaccactgcggaatccggtgccagattgccctttaatatggcaatgccgccggtctggctgtagggattctccaccggacggataacctccgggttcctgttgacgcagtcctttatattctctcccacggtcctgcccgtgacagtcatgcagtccaggttcagaagccccttcttgctgatttccttcataaccgcatagattccccctgcctcgttcaaatcctctatgtaggtaggtcctgccggcgccagatggcacaggttgggggttcttgcgctgatttcgttggcaatatccacattcagctccacgcccgcctcatgggcaatggcaggaaggtgaagcatgctgttggtggagcatcccagcgccatatccatggtcagggcgttcataaatgcttcttttgtcatgatatcccttgggcggatgttcttctcgtacatctccatcaccttcatgccggcatgtttcgccagcttgatgcgctcggaataaacagccgggatggtgccgtttcccttaagtcccatacccaggacctcggtcaggcagttcatgctgttagccgtatacatgccggaacaggaaccgcaggtaggacatgccttattctcaaactccttcacatcctcctcggacatgttgcctgccgcgtaagcgcccaccgcctcaaacatgctggaaaggctggttttatgccccttcacatggccggccagcataggaccgccgctgacaaacacggtgggcacattgatcctggctgctgccatcagaagtcccggaacattcttatcacagttaggcaccattaccaacgcgtcaaactgatgggccagcgccatacactccgtggaatccgcaatcaaatcccgggtcaccagggaatacttcatgccgatatgccccatggcaataccatcgcagacagcaatagccgggaacaccaccggagtaccgccggccatggcaacgcccagcttcacggcatccacaatcttatccaggttcatatggcccggaactatctcattataggaacttacaatacccaccagaggctttctcatctcttcctctgtcataccaagagcattaaacagggacctgtggggtgcctgctgcatacctgtcttaaccgcatcacttttcatgttgtatcccctttcatctaatccggatcatccagtcataaccgtccgtctgtcaatcatccaatccgttccgcaatcaaatcacccattttacaggtgcccaccctggtacatccctcggacataatatccccggttcggtacccttctgtgagcacagcctgtaccgccttctcaacagcgtccgcctcccggtccatatcaaaggaatagcgcagcagcatggccgccgagaggatggtggcaatggggttagccatatcctttcccgcaatatcaggcgcagagccgtggctgggctcatagaggccgaatttgctctcattcatgctggcagatgacagcattccgatagagcccgtaatcatgctggcctcatccgaaaggatgtccccaaacatattctctgtgagaatcacatcaaactggcctggattcatgaccagctgcatggcgcagttgtccaccagcatgtgggacagctccacctccgggtaatcagcggccacttcctccaccaccttcctccacaatctggaggaatccaggacattggccttgtccacgctggttaccttcttcctgcgcttcatggcaatatcaaaggccttgacggcaatccttctgatttccttttcattatatgtaagtgtgtccacggctgtcatgacgccgtccacttcccttgtgtacctgtccccaaaataaaggccgcctgtaagctccctcatgatgaccatgtcaaatccgtccccgataatctcctttttcagagggcaggcctcagccagttccttataaagataagccggcctgatattagcgaacagccccagacccttgcggatagccagaagccctgcctcgggcctgaggttaggagccacgtcataccaccgtgagttccccacgtctccgcccacagcccccagaagcactgcatcgctctttctggccgtctccagggcttcctctgtcaggggcacaccgtacgcatcaatggagcatccccccatcagaatctcggtataatcaaaggaatggccgaacacctttcccacctggtccagcaccttcctggcttccctcacaatctccggtccaatcccatcgcctggaatcacagtcacattataattcatagtgcatatctcccctgtcttctattctttatggttatatctatccataataatataatttctttcaatcatatatcatttgaaaaggtatttcaacctttccgacagaatttcgctatagtgaaatatacaagtttggaattattatcatgactggaagttatggaagttcccgcaacagcctgcctcttatttcctttccccgcctcttatttcctttccctgtcttctatttcctcttcccggctcctatgcttccctgaccaggcaatattgtctcagcgcaaaatgcttttccatcacgccaaataccttaaatccaaaatgctcataaagaggcacattatccggattatgggtttccagggatatcataagcttgtgctggtcggcataacggataacctcgcctaacagcagggctgccaggccgtggtgctgcatatccggtcttacagccagatagataatgtgtatccgttccgtccggtgcagctgtgccgtccatctggagttgaggtaatccttgcccagcatgaacttccacagggtcttaaggctggggtcctccttaatcaggaactcatcagttctgagagacgcccatgcctccgccagataataggtcagcggattatagggctcggtttcatcggaaacaaccagcagggaattcatctcagggctgtctgaataaatctcgcaggtctcatagaattctgtcaggtcacaggcaaacagctccggcagaagccgtttcctaatctcctcatccgggatcagtttgcagtataacgggtcgtgctcaaaacatccggtcagaagtttctccaatctgggcaggtcctcctccttaacccggtataattgtcggctttccatctctcatttactcctcctgtatcttactctcacttgtatataaatcctgttttaattcagaagcccgatgcccggcctgccggattgccttcaggagcttgccggcagatgatatcatgtaccggatgtcatcaccatagcagccaagctggttctcccgggccctgacaaggatatcatattcctcccgggtatccggattttcttccccggccctggccttcagcctctcaaccaggcgaaacaggttctgatggcggacaattctccccgccccccatttaagccggccgggcggctggttcagaacgtattccgtaaagtaggtataaacctcctcctcaaacaaaaatgcatagcggttgttgtctattgtatagaccgcctccagagctccgggcaggttgcggttttcaagacaggcaatggccctgtccatggcccttacattttcctggaccgcctgctggggaaagagcacatcatcgtgccagctcagccggacaaaatagtcctgctcctttttaaagatacgcaggagttcccggttcagggacctgcatccggctgccagcagaaaggccttttcttcctcgccgcggtccaggagccggccgtatgccctgtttatctcccttattttactgtaaagggcttctcccgcctggattccctgtttcaaaaccaaatgcagcccgggcagatccgcgtctgccccgcggcacacactgccgtcaatgctggccgctgcgccttcaaacagcctcgcaaaattcatgggcactgccgctgtcctgtcaaaagccagcacaaggccggcgtacatctcatggtggaagcggtataccggttcctggtaaaaattttcattatcatactgggaatggtaatgtgtctccatgaattcccctgcgctgaaatcattgaccatggacggaatccctcccacagccagggaaaaatcatccgaccaggtctgtatgggactcagcacttccactccctccggatatggctggtccgcaaaaaaaccggctggcagaccggttataaattcctccagaaaatccgcatattcatacacgcacctcacagcatccttcctgccatgggcgtgggcaggcagctcgaagttcagatccgcgataacctttcccgcccagtcaggcctggccgtaaatacctgctcataggcgcctgcagaccagtcgtatttggaattcaccactccccactcctccgcagccatggcgcagaacacaagggtctttctgggcttatacgctgaccgcagcacggctctggctatgccaagcatcatggccaccgcggcattatcatcctgaaatccgctgaaataggaatcataatgagctgacagcagaatcattccttcctctgttccaggtatggttcctatgatattataagtctcctgatccttaagcaccgtggacgaggcgtccaggcgcacctgcacctgtttatcctcccccatggacgccttcagcactaaagcgtcagcgcgggacatagaaaaagccggggcataatccgggcccgctatgtcctgggcgttaagcgcttcgtcgtttatctccccgtacccctgctcctggacagcaatcagggcagccgcccccttcagccaggcctggtatacaggaaaattaatccaccactcatccctctggttgatgtcaataagaaccagctttccggtcacatccacctgtccgtaatctgccgccgttccctttcccagatataccaggctgaattcccggaatccgccagtatggaaatcagtctggtaagcccccaattgaaaccggtgctcccttccccggctgtctgtaaaaaccatgactgccttctcaaactcccagctgtccacgcatatcctgtccttatgcacgtccgaaagccccagggactccatttcccggaccagcatttcgcctgtctcaaactctgcccttgatcccgcagttctgtatcccagcaccggattggtacggtatttctccatccgtttagccagactgtaggaatatccggtgtctgtttccatgcagattctctttctccattcttccccattcatgacacatcacctcaaaaatagctgtaggagtaaaattcccatactcctacagcatcctgtattccgtgttcagttgtgttactggttaatctttgccccgtcatcccctacccagtaggaatccggcgtcagacagttggtcagcatctcgccgttgtcagcgcagtaatactccctgccttcccactgtatccatccggtggccatatagccctgtgcgtcaaagaaataccacttatctcctatctgctgccagctgttggccggatagctgccgtccgcgttgcggtaccaccattttccgttttccggagtctgcacccattcgccgtttcctcccgtgggattctccctgaactgggccgccttttcctccggtatgtacgtgctgggagattccgcccagtctcctttttccttgctgtcaaatttgcttacaggccttaccctgaccgtgtatgccgtattgcccttctgcatgcgctcgcggcagttgcatgtattggtgctgactgtcatgacagcgcccactgccttgtcgtccctgtacacgcgcacctcatagctgcccgctgccggtatggcgtcccaggtggctatgccgtcctctgtgaggaccacgtttgtcagatcatgaagggaggtgttcagggcctggagctccacatccatcagcaaggtggtgctggaatcctcccgcttggaatttttaaactcagctccgccttttatggtcaccttatccttgggaagggactggaaatagtaatcgtcattggccgtcagggtaatctggattctgggtacggtgtcctcccgccattccacatcgtcattcaggatctcatagccgtccacagagtacttgttgctgctggtctcaatctctatgagctcatctccgaaatccgtatccggctttatctctgcttttatggtcagacttatggacttaatgggtttacggcttgcgccgtatgcaggaaacaccatcagggcagccagtacacctgccgcagccatcattaatttccgcttcatgtgcagcatatcatgattcctcctttttacgttcctcatataaccctactttatccagttttgccagctgtgtcaatatacatttccttacgattccatggcttaacattatccggctcaggattccctggcagccgcctgtgaattcctgtcctccattctgcgctccaggacctggtactgccgctgcatctcatggtatttatccaggataggctgggagcgctgcctcacagcccccatgatggtatcataattctccacgaacatggatacaatcactgaatctataagccccttttccgccatgtcctccaaaatgaacactgttttttccttcgaaaatgcatccttatagcttctggttcctgtcagggcgcttatgatatcagccaccgccacaattctctggggcatatccagagattcggcgtttaaccccctgggataaccggaaccatccagcttctcatgatggcgcagggcgatatccctcaccctggctgacacatttgttcccagaatgtgctcggtcaaatccacatgggtcctcatgacccgcatggcctgagggcttaatttcccgggaaattccagtatctccacaggtattcctatctttcccagatcatgaagcatggctgcgcagatcacgtctctgatatcattgccgctgtccagcatacggactgccagttcctcgcttataacagtggttgtaatggtatgggttacggtatgggagcttctgaagtcaatgacataggtcagcatgcgcagaagcgccttttgctcatcctcggtaaacggaacctcttccatggtcctgtcaaattgcccggacacatcctccggcagacagtattcctggccctggacagccaggcggtccagaacttccggtcccaggcgcctgaaaagtcctgatactctggggctgtaggccagcccttcctgccttctcaaaaactccgtgaatctctggtatccgcctgtataaccggatgatccgaaatagatgtctgcccggtccgccagattgaggatctgggccgcctccctgactctctccggcacatccttctgttttctcagccggttccagggcatatggtgatacaggacaacggaatcccaatattcaaacggcgtaaaatagtgaaagaacagatatccgtaaatggaatgattccacacttccttcgtctcgaattccaccatcctgtcaatttcctcggtcttatatgcgccaatgtcatggagtgcagccagaatcagcaggtttctcatctccgacggtgtataggtgccatcctcctttagcatctggaacaccagataggagacccgggcaccgtgtccaatcagccttgggtcaaccagattaaaagctcttcttgcgatattaattaaatccttattgcccacaggcagggaatattccggcataaccgctccttttctctcactccgacttatactctgcctcctattttcacacaaagcccactataaatcaagctcaatctgataccccgaaaaggcggccccttcctgaaaggggcccttttttactcccacttaaaataacgcagcgcaatcccgccgcagaccaaaaagcagactgccatgtacagacatgatttccatataccctcagccggcagccccagggaaaccgccttaagaagtttgattccctgggtcaggggcatcatatccgcaatcctctgcaggccggagggcatggtctcatacggaagggtggcacccgaaagaaccagcatgggaaaatacagtatgctggcccacatcccggctgtcctgacatccggggcaatgcctcctatcatcatgcctatgctgaatatgaccagcatcacaaacaggaatacagccaggtacgctgctgctgagcctggaaaacgcgccccgaaaaacaggaccgccgcagcatagaccagaaccagggatgccagggaatagacggtatataccgctgtctggaccgccagaaggagggccggactggccggcgttacctggtaccgcttaagtatcttcttctgcctgtattccgaaatcaccagaggaagccccataacaccgccagcgcagaccgctatggcagaaactgccccgaaggactgttccagaaatgtatagcctgcccccggataagcgggccggctgccgaaaatacttcccagcagggatatgaccaccaggggcatgcagatggcaaagataatcatatccatgcccctgatagataacttaagttctgttttcagtatggtataaaaccgtttcatctgttttcttcctcctgtgtccaccacaaatacgcatcctccaggttactgtacgggctgatatccaccgcctcctttacggttccttcaaagacaaacattccatccctcagaataccgatttgatcgcagagcatttccacctcatccatgaaatgggatacaagacatatagaaaggcccttatccttcatttccaaaaggcatttccagacctccctgcgggattttgtatccagccctgttgtcagttcatctaaaaacaccaccttgggacctggtatgagcgccagtataataaaaagcctctgcttctgcccgcccgacagctggcttaacatggaatccgccttatcctccagcttaaactgccgcagcaaatccctgtaatccgctgttttctcatacaggcaggcagtctcctcacagagctcccgcaccttaatgcggtccggataacttgcctcctgaaactgcacccccacctgctcaaacagatgtctgcgctctgtcaccgggtccattcccagtatccgcacttctcccgaatcagcccttctggtccccagtatacattccacggccgtgctctttcccgcgccgttggctcccagcagtccatatatctggcccggccggatcgtaaggttcaggttatcaatcaccttttttccggaataggacttgctcagccctgtgactgtcaccgccttttcccggagtgcagcttgtgcgttcactgctgtttccctgcctttcctctgttcttcccgatttgtcatcttcctgcctcctagttcactgtgtatcggtatatgctataactgtctttcacagctgttcccggcggttcatctccatcagcttcccaatctgtgactccacatacccagcattctcttttgcctctgccagggaagtgagaagcttatctcaggcagtgataatatcgtcgtcctctccgggtgtatcaataattttccggatatcggcggacggatttctggataaggcgtttagcatccgcagaatggacgaaagggaatagttggcgcaccggagggagcgtatgatggtcagccgctgtatatcctcccctgtatagacccggtagccgttggccatccgcctgacggaaaacaggccgtttagttcccaattcctgagcgtgtcaatggtgacacccaggataccggctgcttcctttcttgtatacatggtctgttccctgtcttttctggaacacggttccttaatgcctgcaagcatcctcctgcatatcctgacagcctcctctgcatgttttatttcctgatccacctggtcactgtaacgttttgtcagcttcaatgccgtctcaaaatcccctgacgcagaagttttaacgatagtgactgcctgctttctcagtccattttgcagaacctccacccgcaaggccgcccttgccagcttaaactgctccacatgaagctccgtaaaaatcctgtagccgctctgcgtcctctctgctttcggaatcaggccgtacctttcatacagacgtacggtgttcacatgaatgccgaacatccttgccagatccactgtcctgtatgtattcataaagatgcacctcctattcttttataccacaggtttcatccctgatgttatagtgtagggtttccctctgatacccgctcctatgcggtattctgagaacaaataaaaaaccagcctgttccggctggttttttatcattttcccttcctggctcagcgctttaaatctcgctgatataataatacacaatgcttatataatcctccggcttctggaaatccagtttcagggccaggctcccctgattctccctgaattggtcccataacaccttctgggcagcgtatgacttgttgagatcccgccgttttccatccggaaaaatggcattgaccgcaccgctgcactggttcacaatctgcagaaatccattcatgttcaatatatttagttttatcacaatccaacacctcccggaatatgcagcccctttcatgaccgtgggaggaaggcgccatcccttcttcctactatcattatagtgtatcatattccctgaagatatcgaatttctgtcatcttgtgtcactattctgccatttctgacgatactctttcggactgcatcccatactgcttcggaataccctgccgaagtagctgctgcttcccaggccgcatatatggcatatgctggtgatgggttcgtttccctcagacagcatccagcatgcccgctgtaaacggaagctggtcacgtactctaccggagtcatgttcaggcagtcccgaaacacccggaagcactcgcgctcactgatgaaggcagatgccgcaatctccttcaccgacagcttatccccgcaatgtttgtggatgaacgccagcattatttttatcttctggtttgaccggctgttgtatttggggcttttctccatggtctctgtcatggcaagaaggccgcaccatatctcagacaggaccgacctcaaacggatttcgtagccgcagtcgtcctctgatatccggaaggactgccggagggtctctaaaacaggtacatgggacggctggtccgggtacagcccgattatctctacatgggatgccgtcataaggggcgaaacgtatttccggtcaatgatactgccgctctgtccgctgatcagcagcgggttaaagatatgaaggagtgagacgactgacccctccccgtcctttgccctggacatatgaagcacatttgaattcacaaagccccctgaaccagccgtaaaaacagcctttccatgaggcgtgtcatattccaggctgccctgctccatgtaaaacagctccgcctctttgtgccaatgccagggagactgttttcccgcatacttgtccaactccacataagaggcaatataagggaattccgccgagattcccggcagttcctcttcatagctccccggtttaagctctaccttacggattatcttcatattaccctcctgttccgggaccttattgccaggtgtctgcactctccagaaatatcctgacctcctgatattcccgttccataaactcctttacactgctggaaaatgcctccgcatttccctcgtccagataccggccggcctgagccaccatatcattatattccatatgaaactccctttccctcaggcgcagcaacgcaatgggatacccccatacaatcagttccctcagcttattgtaacactcctttaccagattcagcctgcagttctccgcaataaatgtcagcaccacctcaaagatcttataactattcctattcttcccgagctgccggacatcgtactgcagcttttccactgcatccgccggtgcattctccagcgtatattggaccaccggcttaatggtcagcgtcatcagctgcaggctgtcaagatacagtttcatgccttccctgatttccggatttgccagatccgccttttccgcttcagccaggaccagggttcccttaccctggagggacctggttatccccatgctgtcaagtatggacaggctgcgcctcacggtattaaacgatacctcgtaacgctgtgccatacagggaagtgatggcaggtaggttccgcgggggtaatcccctctctctatctccctgagaatgcgggacacaagtgtatatctcatctggggacgtttacggtaaatgttccagtaaaacggaacctgctccatatcccccaaatcgaactcatcctgtgcctgtgctataaaagacagcaaatccgctgtgatacggccgtacaacgtctcaaaggtctgacccagcagtgaaatgacctcctccctggacagtccctccagctcctgatccgtcaataccgcctggtcttttctgaccatcagataagcaaaccttatataacgcacagtctcccagtaaagattcaggaacagccggttgtccggcgccttgaacaccagtatatataacgctgccggcatggatacagattccacggacaggtgcttcatattatctaaaaagcgtttccaatcctcatcgctccacctcataaggcattcccgccacagcggctcaaacagcagctttccggacagaacccaatctgctatcccggctttcctggatacgaaatatctggctgcactttcccggaacccggcgggtccggccttataaaccaccacgggcgctgttctcggatctacccttacatatcctcctttttccaacaaagccaggccggctcttacagttgcctgcgccaaatgaaacatctgacaaattttgttaatggacggaaggctctctccatatttataatatccatatagtatcctggcctcaaaatattcgtacaccagcctgtttaaaccgctgtcagctctcattcttttacctcaaatatttatatagcatctgttccagcacactggcgtcaatgggttttgcaaaatgcgctgtcatcccggcgtgaagggcattctgcacatcctccgcaaatgcattggcagtcatggctataatgggtacggaggccgcatcctccctctccagggcgcgtatggcccttgtggactcatacccatccatcttaggcatctgcacatccatcaggatcatgttatagtagtgctccggcacctgcttaaaccgttccagggcttcctccccgtcacaggcttcctccacctccacccccatctcttctatcagggttcccgcaatctcacggttcatctcattgtcctccaccagaagaacccgtttgcctgtaaagtctgatttgcccgtaaaaccgctccattgcaccggttccttttctccgctcagcccgctgagcagatagcagattttggaccggtaaaagggctttgccagaaatgcagatacaccggcttccctggcctctgcctcaatctccgaccagtcatatgcggtcagcacgataacgggaatttctcttcccacctcctgccggatacgccgcgccacttccactccgtccatatccggcatcttccagtccacaatgaccaggcggaagggatcgtctgaatccttcagatccagtacccgtcttaccgcctcagcgccttttgtgacaaactggggccgcagtcccatatcctctaaaagctccgacgcattttcacaagtctgctcatcgtcatccacaatcaggcagtgtatgcctacccattcctcaggcaccgcctcaggcgctgcatcctggaactgcaatggaagagccaccgtaaacacagagccttcccggggcctgctttctactctgatatcaccgttcatcaaatctgtcaaattctttgtgatagccattcccagcccggtgccggttacccggctgtttgtggagtcctgggcccgctcaaagggctggaacagtttgctcataaattcactgctcatgccgatcccggtatcagcgcaccggaacacataacgcccatatcctctgccggcgccttgctcctgccttacctccacatgaacgctccccccttccggggtgtatttggccgcattgctcaggatattaatatatatctggcggatacgcagggaatctcccaccacttcctcatttttcagccccttcagatgtacgtccatctcaaggtgtttggcctctgcctgcggacgcaccagctccgcggattccgtcaccagttctgccaggttaaagggttcctcccgtatggatagtttcccgctttcaatcttcgacatgtccagcacatcattaatcaggcttaagagatgcttgctggacaggctgattttcttcaggcattccatcacccgttccctgtcatccaggcgggtgcttgcaatagccgtcatgcccacgattgcattcataggagtgcggatatcatggctcatattggacaggaactggcttttagcctcactggccgccctggcgttgtccagggcgctctgaagagcgctgcgtttctgttcctcctcatagcgctgctcatcaatacggcgtgaaatcaggattgccagtttatccccggaatagggattgtccacatgaatgatctgcatagaaacccagtgatacctgccgtctccaagcatctgtctcacatccagaaacacctcatttttctcctgtcccagagtcttattcagattctctgccgagaagcggcggcaaaattcctccaggtgctccggatgaatggatgcggccacatactcatagagctggctgtaggattcctggttcccaagctccagcatcaggcccggttttacatagataaagttcagcgaatccctggtcagattcagactgataatcaccgggtaggcattggatatagctcccaccagggtaaggcgttcctgaagcttctcccgctccgctgcctcctctgccagcttttcgtccgtgatatcatgaaaagcggaaatcagtaccggatttccgttttcatccagggtcctctccacgattccggctgcccagaaaaatccattatccaatgtaatcacacgcacttcaaagatgttctttctgccgctgtccgctgtgtccttaaacaactgtaccagattttcatagtcctcctggtgtatcacatcccgaaggctttttcccttcattgcttcattggacgcgccctcctgacagcggaacagtctcagcccctcctggttcataagcaggaagtcgtatggggcttccacggacatcagggcgattccttccggcaccgcattgtacagacggcttatgtaaacggcctgattctttaatttccggttggtcctgttggcatagcgcagataaaataccagaagcagtgcaatccccagtaagatacagcctatcagggtaaaggaacgcatgagtatctcattggtctgggcatttaccacgctctggggaattatggaaatcaaataccagtcagattggagctttaaaggcgtataacagaatacggtggcctctccctggtagttaaaggtggcccatccggtataggaactttggagagacctggcaaactggtccaggctctcacggctgttttgggtctccggaagcatatcaaacagattctgcactgttttattgctgttggggtggggagagcgaatcagcacatcccccttctggttgaccacataggagaagccggcattgttataaaaggacagggtgaagctgtctacaatacaatccacctcatactcctttaccaggtatccccgcaccccgtctttcagtgtgactcccataaacaggtcaaatacattgacacccgttacgctgctgatatgagggtcaatgatgccgttgccccggtccgtatccagcagcacagcttccgccttttcgtcaattactgagcctgagggaatacatactccgtcctgcagatacagactgatcccgttttctatctgtgcataattatccataaggagttccagttcctcccgctgccccgaagcaatttccctcaggttcagcgtgacggtacccatggactggtaatcgtccatcagctggaccttcagggtattacagccctgctgggtgctctctataatggtctggacagactgcttccacagctcctccttcacctcatggatgaataagaaagtcagaatgctgagcacagcgcccaccaaaacagccgccatggcaatcttcttctttatgctggtactgttcttatccattaccatcctccccttctcccagcggcctcctggtccatccatttcatggtatcttccagttcttcccctttcatcagacgttctgatgccctggctgtcagttcccatataggaaattccagaagcgcatccgtccctatgacagtccttccggactggtaacaggagacaatgggctgtatctcttttacagacgatggaatcccctcccttaaggggctaaaggaagactgctggtccgcaaacttctgtatgttttcagaccgcgtaaaaaattccacaaaggccagggcttcatctatatgttcactggccctattgacgctcagcctggtatccgcattgatcactaccagtccgccgtcctccagcacaggataaggcgccaccacaaaatcaaaatcagggtccatcccttccacccggcctgctgcccatgccccggtcagcatgaaaggtgattccccctttacaaattcctccaaatcatccgaggttttccgggtctccagtgctttccctgcatccacatagccattgtcaataaactccttaaccagagaaaaaccgggggtcatgcagaaactcagctcttctttcccttcattcaggtgtctgaacatctcatcttcccggttttcctgatacgccgaataaaaactccggccaattgccagggtcttaagggatatatcattattggcaataacaggggtaatgccctgctccttaaaataactgcatacctgcctccactcctgaaggttctccggcagcttctgcttatgttccttcagcagcttcttattacagtaaagtccaaaacctgacacagtggtgggaacccagtaaatctttccatgctcatccatctgccggagcatacggtcactgtagtcctgaatggttttaaggccggataaatccataagctgtcctctggactgcatttccagcagaacatcgtggttcaccatgaatacatcgtcaccctttcccgcgtcaaaacgctttcccagggcttcatagtattcatttcccttaaggctttcataggatacccggatgccaggattctccttcatgaaatccgacaggatttcctctataaccgtcacattttccggctcatatttatttccgaaaaaagtgattgtggtaacattctcattgggaatctcgaaattaacaaccttattcccagtgccgcagccccccagcataagggcgcttgccaaaaacactgcgtacagccccaccatccttctacccataccatatcctctctttgaatccgtcaaaccggcaaatgacctctgtcctactctgtccacatatattttagcatgatacacagtacggtacaatctttttttctccgtggcagaacgcaaaacagaggataacgcacaatatcctgcgttaccccctgccctccttatgatacaaatgcagtttaacgaacatgccctggtttatggggctgcttctgtcaaaacagcctttttccatctgaaatatctattccaagctctttcgccaggccggtctgcttaaacggattaattttctccactgcgccattgcatctgaaacatgagcctgtatttttaaaccaaaatgttttgtttgcttttacacattgttcacggatgtccagtacccagtcatagtcacacacccgggcgtcgcgtcctgtttcaccgccaactgtaacatggtccactccatgaagatatggcgtcagatcgatggcctccaaaagcggggcgcaggcaataaaacgccgttttatgggataggataagaatagaggaagtctgtaatcggccattttctggttttcaacagtacagccaatattcacattatcatagccggttccccaatccggcggaagcgatacaaggaaacggtcaatacgctttgtcagaatcaaaaaatcaatatctgtcctctccctgatcatggcccaaacttctttacgccattcatctgcctcgggaaggaaaaagtcagttgcaaagcaggttgcgagaattttgtttcctttaatgttgtactgtccctttgcattcctcctgacaggccaatcaaatttgtctgtcttctctatgatgttttgaccgtaccgttttgcataaggcccataaaaataacaatatgtacatccgtcactggctttataacagcctgtccatggttcccagttcatagaacctccttccgtgaatgtctttttggaccaggggccgcatacgcttaatggcatgatacactcccccagggattgattcagctctgcagcagtttttccaaatcagatacagagacatccattcgtctggaagtctcctccatggacatcccggaatggataaaccgcctcacaaccattttcatgttctctccaacttcaatgatgtggccgtccaaatcataaaaacgcactgtgcgctgtccccatccggcttcttttacgccatcacctatgtattgaatgtcattgcgctgtcctaatctatctataaagccgtcaaaatcatcctcctcaaaatacagctccatattgtgtgccttttccaatatactttctttagggacacctgtcagccagtcaaattcctgctgtaaagacagtccgccaaatgagacgtttataccataatcttgaaatacctccagatcaaatagatcctgataaaatttttttgaaagattcacatccttcacagcaatacatacaccttcatatttcattcaaagttacctccgttttaggataatggctgaaaatgctcacggttgtcatggctgccgccatcaagaacattccgcctaatgataacacagttaatatgacaactgtgtgtcatattcatggctgcccgccagtctattgctgtcttttaccagtttcattcccgtttcaccagaagcgtatcccgggcctgaacgcccgaataaaaaaatgccctaaaaccgcatgaatgaatactacattcttacggtttttagggcatttatctacacttcttaatgattacttcgcgtaatcagtaacttgctcattttgcccttattataagcaccttcccggcctcaaaaaatttttcacgccaattttacgccaatttcttcaacattgcccaatttcctgatttccttgtgtttttcctcatgtgtttcatgtacatataaatccattgttacagtgatagaagcatgtcctaatattttctgcagaacatttggtttcattccatcttcaatacatctggttgcaaatgtatggcgaagcgtatggggatgtgccggttcaaattccgcataagtagtattgttaatttccgcttctgccctacggtcattattaattctggtaatcacccgcagcatcatcatacgaaatgtcgattgacctactggatttccatttatagtgcaaaatattaaattatcaaactctttgtttttctgccagttatcacttctctgacggagtttgaaattacatatccgctgatcttttaatagctggattgccgtatcagttaacgggacggtcctgatactttttttgtttttaggacttccaaagtaaaaaccaccttttgccttatcctgtagcaaggttcttgttacatgcagctctctgttatcaaagtcaatgtcttcccattttaaaccgcccacctcacctggtctgagacccgtctgcaataaaagcgcatatgcattatagtacattgttcccctgctatattcaaggaaaaccttttgttcttccctggtaagaactctggagtctttcacatcccgttgcttacattttaacccattcgccggattcttcgctaatatttcactctgtaccgccccatcaaataacgcgtgaattgtaatttgagtcaataccatagttccaaaagcatacccttcatcatacatattatttaaaatggtttgtagttggatcttctttactttgtttaactgcaaattaccaatcgccggtttaatattgttctcaaaacgactcttataattttttactgtgttatcttttacaactccttccttatagagctttatccatttttcaaaccattcagtaacacttactttctcccctgtaccagaaaggccgtgttcatcttcgtaccgggcatcattaagccattttttcactacggatagtttgaaatcgtaaaactccatgcgctttccatattgattggtgtagcgggcagaatatctcttatcttttctttgatataaacccacgcccaattctttgccacgtaaatctttgcccatgcaatccacctttccgattacactacctcttacttattaagcctaccaaaacagccatttccgtttgaactgtatttacaaagaaatttgtcttttttcatcaatccacccttcaaatttcttccgcttaatcagagtcctgtttccattgtctatagaaaattcccttttaacatctaatgccaccaactctctcagccggttttcacctattccaaaatatacagccgcctcctctatggtaagcaggtacttttcccacagcggtacagccagttttttgtccattcagtcacctgccttcccctaaaaatacagtgcgagattacaagcctgccaaccggctgatgccaacagccacatatatacgtcgccgcatatcctgcactttatcgtccaggcccacccgatggttttcacatcttagagggaagtatcattattgttttctctacatgtcgtcgcagatgattggctaaatcactttacagttcttcgctcgctttaacaaggtcatggcaaatacgctgatgtgctccatatagaggattcttagcagtcttgctttctctgattttcaatacgtctataacaaaccctcaacttttagcaaattgtaaaaaggcattaaaacaagcaggaatctactggatatgtttccaatagactcctgctactaatactaattaaaattttgcttcatcaccaaattgattatcctatcacctcaatccgatctcgttccctgctataatgatatacctttccagaaaggaaatcatcgcagccatactgattattctggaactctaatgcacatttaatggcatccggagttatcagactgctgttatggataaccgcaacatctgtactaaggaatccaatatagagatcactccccagtaattcagctaaccgttctgctaccccaggcagaaaaattgaaatggccccattgatatcatttaccgtagtcaggaatattccatctcctctgttgtttttcacaacttccggaaccgtatgcataaactcctgcttatctgacatccccaagaagaaagcatattcatcaaacaacctgggcggaaataaacggtatgtattccttatggcattttccataacttcttcttttttcctgtcccaaatagaaagcaattcagtgcggaccatactgctgacatatttgtctttcatagttcctatattaatatacagtgtcaaagcaacatcgccaatccgataaaagaccccattgtgcagtttttctgcattggcactaaaattgagcgggcgcaaaatcagggaatccttgattttttcgtagcagtcagcatcgtcaagcagccccaatcctgaaacacggtatcccagttttaaagtttccctcacctcttctgtaatttcttccattgttgcttttttgcttatcaaatcctggaagatttcttccacatgaaaacgctgtatccccataccctcattggtgggaatttccacaatcaggtaatcctccgtctccgaatcacctgccggacggaactcaacctctgccttccagtcctttatgacattctgcacttctttctttaaaccgtctacaaactcaaaatattctctgttcttctccatttattacccctcttttcttatatttgaaatcattgaaacagaagggaaaagatatccccggcgacaagccatgattcttttccctgcttctattttatatacagccagcttttctcttattttggacaatacccaatcacaactttctgattcttccggtcataccgatacacactatccgacaatacgctgtcttccataaaatccatgccattcatagttgacacagtctcctgccactcctctaagtccatcctgcttttactgtatggaatcatcaaaaactcatgcaggctggagggcagtagtacaatatcatcttcccacaaatctgcaatctggcccagcagtgattcattcagaatactacaggccccatattgttcactgacatttgtgagcatgtacataggaaaagttacatcctcgatatcagccatattctccaaaatttcgtccatgctgtcgcctatcgttatcggttgaacccctgatattgtacatgcaacctgataaatcatagggggagttaatacaggggaattccggttggcggattcaacaacggcctccagccccactccccactttttcaggtcatcccaggtaacattaaaatcataatctccatcgtgccgacagacccggaacgtcttaatcatttccagataatcttcatgcggtatgggcctgccgtctttttctgctgccgcggcattctccaacacataaataatcctgtctttgacatcttcaaaagtaccctgttttataattttaatcttcctctctaaataaaataaagcctcagaaattttctgacgcctttccttttggcagtttcctgccgttattcattctttatgcccaatgctcacaggggaaataatccttcagatgatactgcatatcttcccacgccttgtccttttcaaaacgttctgccaactcggtcaggctgcagttcttaaagacggtgtatccgtatcttttttcatattctgccgccttccagtatcgttccggatattgctcccaatagattctccagctcgcctttcccgctttatagcacggaatgcagttattgtggttcaagccatttctataggtttccgggagcggaattccccactcctgctcaataatgcgttttatctcacatccgcggagcttcttttcatatataggaaaccggatggcccgcccggttctcctggcccttgcaagagcattgcgaacacgttttccttcttccacaccaaagccaacatactcaataaaatcctgattctggctttttaagtatttaaaatactcctccttcatcttctgttttagttccatggtacaaaacgggaggaactgccctggtattgctttctgatcttccataagctcgtctaagttccgtccgtctccccattccgtaatcggcacgcccaggtatcttgccacacggcatcggaacgtatccgcatcatggttctccgtaaaggttggtgtgtgcagaaggacaatatcctctttcttttgttcctgaagcaccagataagccatatacgcactgctggcacctccggaatacaataccacatgtctcatactcagccactcactatcagctcgtggcaagcaatataccttcctaagctcgcagtttaatagccggtttcaatcaggtcggtttctcagccgtatcatacttcgcctttccctactcacggcatctgctcacgcaactagtattgcttttacattgtgttttacagtctcacaacaaccggttcaccggattagtatgactcctttctgctttttatgctgctgtacagagttcctgttctcctcctaatatataagtgtagggtttcagtacccaacaaccagttgggacttaatcctctcattgtttaagctgtataatgattaggcatcggtctgacagtattctcctgtacatattcaacaactgaagcatctgacctggcacaaagctctgcttccatcaaatcggcttccaatacatccgccagaggttttcccgccaaatgcccgtgtctgattcttacatcatcttttctcaattcggcaagttctttcacacgcagcaatgcgctgcgctctgccagttcccaatcttccttcgtcagacgtctgcggattgctttctgccatttccttatgaatcttttggcctcctcataatcagcattctgtttgtcgccaaccgtgcgcttctgtcttgtggttccacccggctccacctctaatgtataatatggcttatccggttcactggctttcctcaaaaagagaatataagattcctttgtctgaatccggtcaaaatatatgtcactccgatccaggcaatgtccaagtatatatccctcccttaaaatgtcctcaattctgtccggaacaatcaccgtgtaatctttatccccatactcatacttttctttgttctgctgacaaattttatcaacatccggaaatttcttcgatatttccgccgctttcagggcattctccttttctctcaggactccaaccaattcatcatggctttttatcaactcttttggcttaaatatctgttcctgctctaaatccatcttaagccgttctgccatggaagtataatcctcccatgttgaaatcagttcctttggagttcgccctgtttcccggtactgccgttgtaagtaattgcatattctgattggtgtcattttttcaataataaagctcaaatcacctggtccaatctcattctgctcaaaatactcaattactgtatgagcgatattaattccccttcgtttctcaaggcgcagccattccaggtatatgaaacctccgttacactccctgagccgtttcatccggcttccatctattccaagggatttcgccagatcctttcctttgcttaatgaaagagttctgcggtcattcagtatgctccaggcaatcctgcttaaaccggcttttgtgatttgctccagatatggtttctggagcagtgtttcaagatattccctgggattgattctgtccacatctttggccaactgcggcaatcctgttttacttaaagcgccagaagccagagccggcaacgtccgtttatagacagaccccagcatatcatctctggatctgtagtattgaaagtacccaaaacctgcatttggcttttccccttttatccatctgaattctgaatgtcggtactttccataataatatggagtttcttccagcgtatcgttgtacacaaacctgcgttcttccttgcaggacaattctggagtttcataactctcctcggaatagatacggattgcagaatactcacgaatgacaaagtcattcccgcatttctgtacaagatatacccattcttcatcagtggaaaaatgccctgcacgtcctctggacttaaactggattttgtgtccacaacatttacagacgcttttagcattatgcttcgttttttttatcggtacctctttctgacagtatgagcagtaacctgttttcgcaccatttctcacataatcataaaaaatgtaattttgatgtatcccatgcttatcaacccagcggctccagtcttttggctctggcggaacttgagccattactttatcccaggattcagttcgccgcttgtgtttctgattcaacgcattctcacgtaaccgctcttgataaacagatatcccgtcatacccgtctgactctacctcaagatactgtttcatctccctgttttcatcggaatcaatataagtatttacggatgtaatatagtttggccattcaagattcatcagcatggaggtcctccactttgcatgaatgacatcccatgtgaggaacttaccggcatttctatcaataaacaactcatacaccggacgggtgcctccaatccgcagatcccttgccaggaaaaaagctgcctttaaaattccatccataacctggcttcttatataaacctcacaccgatatgtatcccgcgtattttccttctctggaatatccttttcagcaatctgcatcatatcactggtaggtgttagttggctgagccctcttaatctttttttctccatgctatgctgctatcctttctacgatagagccgtccacctggtaccaggtatctggcaggatttcctttccgtcaacgacaaaaagtccaatttccataacttttctgctgtcttccatttccttagcaatccccaggacatctcccagttttccctttgcaaccggcgccttacctctgaccacagcaaatccgctttgcgcctctcctgcatcatcacatacatgtatattgttttttctcatcggatgctcatatatatacctgagactatgtgcgataaattcagccatatttaactgttttaccaacttcaatctagttgctgaaattttactgtcgcgagcgtcttcatcaatatctccatcgacaagaaccatgtagtaaacagcgttatcccaatccgaataataagacaggcagtccaacggattttcagcacagtggaaaccattgcgggcgcagtttgcttccttctcctcattccaaatccctaagtggtactgaaaccgatttcttccggatgtacaggataaatctttgtcaaatgctttatatgcaatcatcatgtatgatatcctcctaacattcaaaatcagaacaaagaaacctgcccctctatttgatttttatcttccttttttactttcttttcacctgacaaatcagtttttttgtcctttatcggcatagataccgacgggcctgcctctttcttcttaccggcctgttttgattttatagccttttttcctttacctgaaggcggtatcggctctttgcgttttaagaaagttttctccgtttcctgaactgatttttccacctcttctttatcatccaattcgtaatattcatcggtccattgatataccatatcatccgtgactgcaacacagaccttacgctgtcttttgccatcttcatcggtcaccatttcctgtgctttcgacatcaaatactcaatgcaccgctgcaatgttttatgtttctgaagaaccagtgcagaaaaatcggactcatcacagcgctttagaatatactgcccaatcacatctccaaaatgaggatcgttcagaaaaccaatttcatctaaaagctttgccctcgcagtgtcataagtctttgcatctccaccatctaccaaaaaatatcgcttccctttcagataatcttccacatcgtcggagggaatcttattttttttcgccagaattttcagctcctcctggagtccgattcttctcaaatctgcagcaatcgcattaatttcgtgaacactgtctattttgttaaaaactttctctaccatcacattcctcctggcataaaaataaccggtgagttctcaaaactcccggtcataaatattaagcagccgtatccatctcctgctgtccttcttctggttgttcttctgccgtttggtcctctgccatttgatttgcaggcggctgttctcccttccaatatttatcctctttttctaagattgacaacacggccaggatcagtccccggcaccatgcattctgccagctgtggttaaaaacctggacgccatcaacgatattctcccattccgaatccgagagtgccctgccacaatattgtttatagaacgcatagcactgcttcatgacgtcattatatggcacgcttaatgcctgatctaatccacttatgaatgccagcagcagcggttcctccggatatgcttctgccagtgtcttgagatccattgtctgtctgccgttaaaaaacgaaaacatatcattaaataaattcttaacaagttcctgataatccatcttttccctctctccttattccaagtcattcttgtgctattggcggttttactgccttatttcaggcaacattctttgtctttcgagctttttcctgagcctcaaggatgcctaaaagttccagcatctgctgtttgcaccactcgttatcccatgcctgattcatttgcttaaaatcctcgactaccgaatcccaatccaactcactcagcccccggtccgcatatctcttataaaaagcatacgtttctaccataatagcattgggatcagagattacggccaagtctaggtttcctatcaatgctttaaaaagactgctgtccttgtacttaccatacagtgccagaacacccttattggcattgaacaacacatagaaatcattgaatatggctttcaccaaagcactatcgtccatttactccctccttttctcgtaaataaaaaagacacttagaataataattcttccagtgtccctgctgtacaatatgtaccgcttcttattcttccctgccagttttccagaaatgccagttgctgatcgttgacctggctcgctacattgaattcatcccctttctgatttttatatataaaaaggcgcagaaaatcatatcatctctgcacctgattatccatgataaaaaagttgtctttcggctgtgtcccgaaacaaaacttattgcgcttttctatagcacaaaaatcaatcacaccaccagtttataacattatgtagttcaagtcaacatctttttctatatattgtgtttttaagggacatcagttctatatacagtattctattcagaaaaacacaggaaatcatatgacctatttatatctttccggacaataaaatatcagaagatccatttctggtttctcctctttcccatgatttctcaaatcacaggatatatagaaatcgtcaaatataaatgccgtcacattttctttaaagtggcccatcttgtcaagacagttttgaagcaagtttatcgttaggtggtaaacgtatattcctggaaatatctggaacagtccgtgccttttctttccttgatgacacaagacttgagggttggacacgtgtcaaggacctgcagtagtgctttgccccttgatacatggtacaacctcaattaaaacttgtaaggaaatataaggaaatctttatggtatccagactgtggttcctttataatgataacaggaatgttgttttggaacaaaaaatgcagaaaggcggtactatgataagcaaaaaattatttatgactttaggactttcctgcttgcttctggtcggttgtcagactgctcacaagacaatgccggaatcaagtactcttacttccacaggttatgcttccaaagaggtacaacttatctcccttttttatgatggcgctctgtatctgtacaatgccaccggctttgaccttccaaaagagaaaagttgggaatttttaggtcagatagcttttgtgaataatttagaatttcccactgaagatttctgtggcacccacttaaatgtgggtcaggaagtttaccgggatccgaaaattcctcagaaattatatgtaaaatacgattccggtttcgcactctttgaagtagaggagacgaaaaaggaagaaagtaccgagtatcttgattatgtaactgcgggaataaaattatggacttctgacagtcttgaacttaaacttacgaacgtcagtaatgaaacgataagctatggtgaagcatttactatggaggttcttcatgacggtatttgggaaaagcttccggtattattggaggactatggttttaatgatatttcctacgaattagagccgggagaatacagctttatagatatagattttgcatggttatatggagaactccacgaaggctggtttagaattataaaagaaatttatttgcaggacggaacagtatattccgtaccagcagagtttggggatttagatttaagacagacagagatagtaaactataaatgagcaaatataaaaaattgcacaatggattatgctaccaaagccaaaacttcttcaaaatggatatgccttgttccgtactggtagatgaaacggacccgttcttcctggatatggctataaatataggcatatccgtcctcaaaggacatggtttcaccacatccagtacatgcgatcaaatatgccagcgacatcagcagccagtatctgcgaatcccttctgatgaacgaacctggtacctgtcaaatgccagtttgtcttttgactgacggaaaaagatctccactggccaccgttccacatagttgtccagaacctcccgggtgcttaaagaaacatccgtgctgataaaagcccgcagggctttgggaacatggaacgaatccttcgggtagctgatcagcaccactgcattttcaacgccgttgaggtttccatcataccggtagacataataactccggctgccaacggtcacgaggctgacagcggcatctgttttccgtaaatggagggcaaactcactgaccttctgcttcattccgcaggggtacaggatccggtttgtcttcaatgcaccaatggtgtagaaccccttttggataaaagcatccataatgtcgccacatgtataccagctgtcgcagagaaaataggagacaactggcggtatgggcagttcactggcaatctcctgtacaatcttcacctttgatatgctcttgtcatacatgacaatggcataattgaggacaatgccgttgcaggagagcatgacggctacggcctggtgtccatagtcctgctttcccttgagatgggactggtggaaatacgcatcttcaatcgtatgcagagcccgtgacgaaggctttgttttggaggagatggtatcatccacaatacagaacacgggttttccagagcgctgggcttccttataaatgaactggatgacggtacttttgagtatgtcttccagtctggcatcgtcccatttccctttgttaaggaaatgggcaaccgtagtacggtggcagggactgtatttttcaaaatcaatagtctttccatgatatccaagagaaaagacggatatcagaatggccatgatatgcttcatagtcgtctgtggaaagacacggcacaaacttaactttttaaagcagttgtaaagtaacgctgaatggtatatactgttatctataagacatcatcctttgcaggttattgttttctgcacaaaaacagtatacacccaaaaaggcgtgatgtcttgatttttaaatcattcaaagcatttttggtaaaaattcaaatttgctcatttatagtttcattaatatacttacttcaaatagttgtttatcctgcgatatattaattgatgttcgtatttactcaatgtttccttgatattaataattccacatacacgatttagcttatgctgttactttacagtcactttatcaaaagaaaaaataataaaaaggcgatatgcaagattctatgaactagcattccgccttttcttactctatattcataacattcaggcttcggtatccgtaactgttgggcatggagttagtctactcttaaaagaacgttattattgttcttctccttcatcagcaaaccgatatcctatcccccataccgtttggatatatttccctgcctctcccatctttttgcgcagacgtccaatatagctcataatattactgtcatcttttacaaactgttctccccagattatggcataaatctgttccttagaaaataccactcctggattacctgccaacagatacagaatatcaaattcccgtttggtaagtaatatctcctgtctttttatctcgaccgttcttttacatggattaataaccaaccctatgctttgattaaaaatttctattttcgcttcactgctattttttgtaaaatgcaccaatatagacatggaattcatttttcgtagttgttccagaaaagattcctcatctgtttcagataactgaatatccaaaataatcagacagaactgatgctttgcaaactgctcaaaaccagctttcgcagaaagcagaacctccatataatttgcatttggttccagttcctgcaatattttcatcatttcatctatagttttgctctgaagtgaatatttaatcactttacagatttttaaatcatcagccataattataacctttttcttcattactcccctacaatatatctatccaaattaatattttaaaagtctcctgcctttaccggaggcttacccgttatttccttatactttttccaatcccgatgccaatactgatacatctgattctcccggtaatctgataacacataattttttttcagatatgcgccgagatattccgtcaccttttttgccccattcatattcaagtgatctcctccgtccatcgtgtcagttttccaatttattcccaactccttttccagtaggttgaaatccagatatggaactccttttcccaatgcgtattcatttacctcattatgccgttcatagctccaattcagcggagctggaataccaaccagaaggacctctatattattttccctgcaaagatccaaaatccgatccatccagaatcttaccattggtttactcctctcctttttatcagtttccttcatatatggtccaccggtatatgttttcgtttcatcatgataattatatccctttaacggatttctctccgttttggatgctacatcactttgattgaaccatgccttccatcggttatgatatttaaaaacaggaaagtaatagtgtgcggtattctttatcacatgttttagttccgtctgtatatctctgcaatgataaaattgatcggtttccagaactaccaattggggcgtctgtgttttcaatacttctttcagccaaaaatatgactccattgtcctctgccctgactgtccgcaaatataggaagtaattccattggtattccacaattccattggcaatacccctgtctggatttcactgtcacccagaaaaagaacctgcagcgtctgcgccggctcagacagcacattgactgcatgaatatcacggctttccaccccgctttccgttgtatatgtttttggcttcacaagtctgaggctccacgacatcagacagaagaacgtgaaaaaaaacaacaggcttctcatatatttcaaagggtttcttcctcctgattaaaaattcgcgtaaattagttctactggcatatagccaacgccataagccccaaacaggcaaatggccatcatcacactgtaataaacactccagcgaagcggtaaggggagctgttttatatcccggcgcacatcccgccctttttcttcagccaaactgataaaaaagacaacggttaaagcggctcctatcaacagataatcccctctgtccagacccagggtcagcaaagtcccgttccaaaaagacgacaggttaaactgtgtaaaaatacgtgcaaacatctgcaagccaatccgcagaccttcagccctgaaaaacagctctccaatcaccaccaacagaaatgtcctgccaacctgaaacagatgataaagggcagacgactgatccagctttaaaaaccggcatagtttttctgaatatggacgcatggctatggacagagtaatcagcacaaaataatagagcccataaaatatatagctccatcttgggccgtgccatataccattgcaaagccatactggaaacaaccccaatgcagcggctgttacctccccccagtgccggttatgttttctggcagtccttgacagccttcttaccggtccacacatggataccggataaaatacatattctttaaaccagcttcccagtgaaatatgccatcttctccagaattctgatacattctttgagaaaaaagggcgtctgaagttttccggcaatgtgattccaaatatttcaccggtgccaatcacaatatccatacaaccggaaaattccatatatagctgtattgtataggcaacggctgccacgccgattactgacccgtcataattttgatatccgtcatatacggtttttaccaggacattcagccggtctgccaccagcatctttttgaaaagtccccaaaagattctctgagcccctgctgccagcctctccatggtaatactgcgccctgcaaacagctctcttcccaactccccatagcggcagattggtccttccataattgtcggaaaaaaggaaagaaacaaagccagctttccgatatttctctctgccggtatttttttgtaatagatatctataaggtatcctgctgccgataaggtataaaatgaaatcccaatgggcagaatcatggtctttaatgagaatggctgttctgatgttataaaactgaagatacggtttccattggcggcaaaaaagttatagtatttcatatatgccaagttttctatcagcaacaggatacaaaaaatcagaaaccctttccttttttcaatcaaaagacctgataaatatgtagttatggttgccgctataatatagatgatcagtgtgccgctgatacaataataaaagtaatatccaaacagcagcagcacataaaagcggtatttcaccggcataagctgatatgcgatcatagaggccgggaaaaaaagaaccagatataatgttgtatgatacgccatattactgttcttccttaagccgttcaatcatttgccacatggctccggctgaattgaaattctctgctacgatatccgcaggagatatgcggatatgataggtatcctccaactctgcaactaattccaggattaaaaacgagtcaaggatatgggcatcaataagagcttgctcctccctgtaatttacatccggttccaactcctgcaatattttcattaattcatccatctgtcatttctccttccaaaaacgttttataaaacaagctggtcagtaatgacggcctgaattgaatcaaaccggccgtcttcctaaacacaagaattccgggcagctccctgctgagaaacagcgccatcccttctgtgattgaataagctcccatcttttcaaaaactaacacatcacctctttggacttcattcagccacatattttttgcaagcacatcatttaccgtgcaaagtgctccgcatacattccaataggctccttcgcagctttttctgggaagctgccgatagaacggaagcttcattcccataatctggccgtcataatgcatttgatggataccgccatccacaatggcataagaggcatttccattctgtttcagttcctggatggttgtcacataataaccgcatgtagccgttaagcttctcccaagttccagggtgattgttcccttaaaactcatattttttgcacacattctcagtttctggaaggccgcttccacttcccactctttctgtttctggaaatattccacaaacattcctggaccgtactccatttcattcagctctatcccataccggttcttgaattccttgtaaattccattcagataaagcagttcatgtgtcattaggctcacatccgttttctgtgttcctgaaaaataatgcagccctgctatctttaaatatgggtgattaagactctctatcagtaattcctccaccagactgagctccatgccaaattgattcccgctggtcagccgaagcaggatacgaatattcttttcatatttttgagctaattcggacatcagaaaaaactgctctttcgattctgctgtaacaactggcagcgtcatctcctttctgaatatccgttccagttcctctttcttttttaacactccggacaaaataatcttctccggcttaattccctgatttctacagatatcatattccccgactgaacatgcctcaatcctgtttacctggtctgccagtgcggcaaccagaaagggatttgctttcatagcataacaaatattgatatcttcacctgacagtttcctaatccgctccacattctggattaattcatcaatatcaaacagataaaatggcgttttatattgttttgccgcctcctgtaaaatcgtgtccgtcatttacgcgcctcctttccaggtttttaaatattccctgtcgatctttccatttttatttaacggcatactctgtaagtttacaaaacgacttggcagcatatatcgcgggagtctctccttcaagaatctgcgcacctgcccgttttctacttctcctacataaaataccgttatatcttttccatcgtaaatacagcaggcctgccatattccagccattaggctgcattcatgttcaatctcctgcagttcaatccgatgccccatccgtttaatctgaaaatcttttcttccattaaaacataaattccctcgattatcataaaaacccaaatcccctgtccggtagattgtcattccagcatggcttttaacaggacttcggacaaatcgcttgctggtctcttcctcattatggtaatagccatctgcgagtgtcgctcctccgacacagatttcccccagcattccatctgccataactggcatatcatattcatttaaaagaaaaacattccgctttgcaaagggaatccctatgggaagcggcacatgttccggctcccgtccagttactcggtaataagtacaattgcaggtaacttctgtcgggccataaagattgataaattctgcctttggaagtgctttccgccatatcttcaactgtttttgcggcatcacttccccgctgaacatgacacggcggattagccctggaattctgtattcaaatcccctcattccactaactatgcaaagagcagatgctgcccaaattaaaactgtaactctcttttcacagagatagtccagcagcaacgccggtaccgcaaacattcttcttggtatcagaaccagtttggctccggtaataacagacaaataaatatcttttaccgatacatcaaaatcaagcggtgcctgatttcccaatatatcatggtagtttaccggaaattcctgacaaaaatcttccataaaatcaagaaccgcctgatggcttacaactacattcttcggcgttccggtggagccggaagtaaatattccatacaaacaatctttgttctgaatccctgtgatcctctcctttagcacagccatatggattggttctactttggctttttctattcccagtagatttccctgaaatcctgccaatatcagacgcttcttcagccgttcatccacaattgccgtatctgcatcaagtacctgaagcattcttcggattcgttcatccggcaggtctggatttaaatagacgtaaaagcatcctgccgatacaattccaagaaaagcggcaaccgcatcggcacttttttccatgaagaccggtataggcctacctgtaatgcttttatttgccacggccgaggcaatatgctgtgtcagtaaatgaagttcacgccatccataacaatacacgccatcgtctaccgcttcacgctccgggaaagtttccactgttttgttgaagtattccattatatagtccaattttaattttctccttctatagatgtacttcaaagatgtttctccctgatttcggtatcttaacagttgacccttaatccatttctgaatcagttcttaacatttctgaactctgtcattcaaggtgtacattccttaaaaatgcttaaataatcttaattctgtgaaaaactgtgctgatatcatgtatgattttcttcacaagattctatcttacggaggtcattcatgataaagaaaaaatttactcgtctttccctgattcctacacacatttatttgccgcttattgtagctttcctctggaatcaaattgtctactgcggttccagaatgttgatgaagaaccacttccactatgacttaacaacaactatggattcgtttattccggttatcccctggacactggccatctatgttttcagtttcatttactggccatgccagtacattctgtgctgccagatgaaaaaagaacacgcatatcactttctgagtgcagattttttcgcaaaaacagtatgtcttatcttttttctgtttttcccaacgactaacatacgtccacagatcagtgagcatggtatctggaatctgtcccttaatcttctctaccgacttgatgcaccggataatctcttcccatcaatccactgtctggtcagctggctatgctatgtgggaatccgcagacaacagcaacatccgctggcctaccaattgttcgttctttgtatggcattggctatatgtatctctactcttaccacaaaacaacatgtaatccctgatgtggctgccggtatattgctagcagagttcagttactggttcgtccattatagtcatttggatcagttatatgcaaatttctttaccaaaatcagccgcagctgataggatagatacgatgcggatttatcggaagattttgaaagagaaccttgagaacgaccatctttgtggatgtgtaagctatgaccaagatatgtgggatgaaatgattgaaattgcgctagacttggtttgttctatcagaaagcagagccgcattggcggcaggactcccccaaataagatattcaagcaaagcatggtgtttggcccacacattcctgtgttgggccgggggaggtggggaactccccaacaagcggaacagggtagccttttggccggttgaacgaagtgaaaacgggcaaaaggctatcccttgccattgctttctaactagtatttttctggaacccgaatattagcaacattatgaaacttatatttttctaccatatgtttcttcataagaaccaaattgtaacggtagcaatctgctataccatccgcaaaggagtcagcattaccttcacgtaattgctcaagtgctagaataacttgcttgttgagatgtgaaagagtatgtttcttcgacggataataagcaaaatggtgtccccattcaagaagatgattggtcttagataatataacatataagggttctaaagtggtatgtttcattatagattccaaaatatctgccaaatgaatagagtcagaagaagtaaatttatctgccaactcgtccagttcttctctagaaaacattggagctgcaactaatgctgccgggcgaataattaataccattagctgtagagcgtgaaggtaacgttgtgctttttctacatatccggaattaagagccagctgatgaagtttcgtatcatccggttttataacaatagtgccttttccattcaatgtctttacaaaacctctttgttcaagttctgataacgcctttctgaccgtcgatatagatacatcgtactgtttggccagttgcttttcgtatggaagaaacattccaacagaatactctccaagaccaatttttagattcagatcatcaataatctttgagtaataataatcctgaccacgcatgggattccacgaaaacttcccccccatttgtgcaggacatttgggattggtctctgacaggtaatttaacgtattttgaatggtatccgtaagtctttgatacatatttgagagctggttgtaccttgtgagtggttcatcgccctttaatatatccataatgacattggttgcagatacagattcctgtaaaaagtgtgtagagaaataggggcacacctctgcaaaaaatgtaagcttattatagagaccaaacgtagaatagagttcgccgaatagagaattacctcctacttttaatatatcatatcctaatttagaaggaggacgccatccaccagcggcatatcctaaacgcaatacttttatagcctgtttatagtgaggtagtacctccacatcacagccttgcaaagcaaaaaccataagggaaggcagtattaaagcaaaagtctgatatacctgtaaaataccttccttttgttttaaaatttcgaaaacagcatttgatgaatcataagcatctattgttgaaacaacaatcggtgcaaggcgaggctgaatatcaaccaacccttccttcctcaatgcgttaaaaacgcggttaatcgtatatctgctcacatggaattgttcacaatacagccgtgaagatggcaaggcatttccaggaagtatttgaccctctaaaatacactgcttaatttcgttatatacaaatgtaaattttgtttcttgtgggttcataatttgcctcctatctatctgaattatatcatgacggaacagttttgtcagtaagtaataataaagcgggagacctatttgcacacctaaccaatacgaatgttgtcaaaatgtaaggataacatttataataaaaccgtaaatttatcaggaaagagtttcagtattatggaaaagcaaaaaattttaatcgtagacgattcagaaatgaaccgcgctcttttagcaaatatcctggaagagcaatatgatgtggtggaggctgagaatggtgtggaagcaatttctcttctctcgcggcaaagagccgatttttcccttctgcttctggacattatgatgcctgaaatggatggatttgaagtattagcctacataaacaaataccactggaatgacacctttgccgttattatgatttctgccgatgattcccccgcaaatataaagcgggcttacgacttgggcgcttttgactatatcagccgtccttttgattcgaccattgtacagcgccggatttccaatacgatgtttttatatgcaaggcagcagcgtcttgagaaaattatcgcagaacaattccatgagcaggagaaaaataataagctgatgatttcaatcctgtctcatattgtggaatttcggaatggagagagcggcttacatatcctgcatgtcaatacgattactaagtatctgctaaagcagcttgtccggcgtaccgagcagtatcccttgtccaatgctgatatttccttaatcagtacggcttcagcgctgcatgatattggaaaaatcgcaatttccgatacaatattgaataaacctggacgtcttacggaagaggagtttgaagtgatgaaaacccattcgatggtcggcgctaacatgcttttagacctgcccgttgagcagcaggaggctccgcttgtcaaagtagcttctgagatttgccggtggcaccacgaacggtatgatggaaacggttatccggacgggcttaagggagacgaaattcccatagccgcccaggtggtcgcgctggccgatgtatatgatgccctgaccagtgagcggtgttataagaaagcttattcacataaagaagctttgaacatgattttggaaggacaatgcggtgcatttaatccgactcttttactgtgtctgcaagagattgcggatacgctggaaagtgagctgactgataattctcctgaacaggagactaaaaatattcaggatataagaaataaaatagactatgacaggttgttttcctatgaaaaatataccttcctgtcccgcaaacagcggcacctgcaattattatatattgattcattaaccagtgtctataaccgtcgttattatgacgagcattttcaaggctcagataatattcaggcgatggtcgtaatagatgtggataactttaagcatatcaatgataattacggccatgacgtaggcgatattgtgctgcagaacattgcacaaactgtcttatcctgtgtgcgaaagacagatgccgtaatccgatatggcggcgatgaatttgtaattatcttttttagtattcctgccaatatatttgagaaaaaactggagaggattcggtattctgtcgatagtctgatcattgacggccatcccgaattacatatgacagtaagtataggcggggtatatggaacaggaactgcaaaaggacttttcaaggctgcagacagtatgatgtatcaatcaaaaaacacgaaaaacaaagtaactatatgttatcttgatgagaataaagacatcgcggacaatatctaaaacggaggaaaagtgattatgaacctgaaagattgctatttaaaatttggcggcgattttgatgaggtactgggcagactgcgtcgggaacagaccgtccggaaatttgtatttaaattcctggacgataaaagcttcagcttatttgaagcgtctatggtgaaaaaggactattccgaggccctcagagccgttcatacactcaaaggtatttgccagaatctttcttttaccagattatttgaaagcagcagtctgacaacaacagcgttaaaacaaaacgactggaataaggctgtggatatgatgcctcaattatcaaaggattactatgaaataattgatgttattaaagaatttaagagttccatggaggaataagatcaatggaaaatagtagcaataagaattctaccacagtttttctaataagcagtttcattgggcttttgatctttagtattattattttcggcctgctgggaatttatatgagccgaaagagcgaaacggccgtttatgaaattggggaaatttatatgtccggaatgaataaacaaatatccagacattttgaaacggttattaaactgcgttttgatcaggccggcggtattgtatctgttgtctcaaccgatactgacgataaagagacactatatgaggaactcatttacagggctcaggtcaggggttttgattatttagcactttgttccgccgagggggattttcagacactttatggccaggcaatccagccgcttaacccggaaccttttgtagaagcgttatcacagggggaacaaagagtcgctgtaggtattgatgctgctggaaatgaagtggtattgtttggcgttgacgctgtttatccgatgctgagtggtgataaaagtaccgggttgatagcagccgttcctctggaatatattactgatttcctttccttagaagatgaagggcagctgatgtattatcatattatcaggccggatggtagttttgtaatacaaaatcccaacacggagctgcagtatttctttgaacagctgcaaaaacagtctgattctgcagtgaatgaatcatcagctgaaagtcctgttgaaaaatttaacgctgctcttaaaaaacatgaagaatatgctgcaacattggaagtaaatggtgaagaacgtcaaatctatggtatttcattgccttattccgaatggtatttagtagcggtgatgccgtatagcatattagacgatgccataaataatctgagcagccagcgcatgttcatgacattgttgtcatgtgcttctgttctaattattttgacactgattttcctccggtatttctctataacacgttcacagctgaatgaattggagaaggcccggcagacggctcttgaagcgaacaaagccaaaagtgattttttagcgaatatgagccatgatatccgtactcctatgaacgcgattgtaggcatgacagcgattgccacagcccacatggatgacaggaaacaagtagagaattgcctcagaaagattacattatcaagcaaacatctcttagggctgatcaatgacgttttagatatgtctaaaattgaaagtggcaaattaacgttgacaaccgaacaaatttcattaaaggaagtcattgaaggcattgttaacatcatgcagccacaggttaagactaaaaagcagacctttgacatacacgttgaaaatatattaacagaaaatgtgtggtgtgatggcatacgcttaaatcaggttttacttaatctcttatcgaatgcaacgaagtatacaccggagggaggctcaatacagttatccctctctgaagaaaaatctccgaaaggggaaaactatgtacggatttatatcaaagttaaggataatggaattggtatgtcgcccgaattcctgaaaagaatatatgaatcctatagccgtgcggatggagcccggatacataaaacggagggggccggtttgggcatggcgattacaaagtatattgtggatgcaatggaaggaaccatcgatatacaaagtgagccagataaaggtaccgaatttctactcatgtttgattttgaaaaagccgccgcaatggaaatggatatggttcttcccgcctggaatatgctggtggttgatgatgacgaattattatgcgagacagccattgacgcgctgaaatccatcggaataagagcagaatggacattaagcggagaaaaggcaatagaattggtaaatgaacaccacaaaaagagagaagattatcaaattattctgctggattggaaactgccgggtatgaatggaattcaggttgcgaaagaaatccggagtaatctgggagatgaagtgccgattttgttgatttctgcatatgactggagtgaatttgaagcagaggcccgtgaagccggtatcagcggttttatttccaagccgctttttaaatctacgctgtatcatgctttatgtcagtatatggacgttggaacagagcatgagcagacatggaatcaaaatatagatctatccggacgccgcatcctgcttgccgaggataatgagctgaactgggaggttgcaaaagaacttctaacagacttgggcgtggaactggattgggcggaggatggccagatatgtcttgacaaattccaaaaatcaccggagggttattacgatatcattcttatggacatacgaatgccgcatatgacagggtatgagaccacacaagcaatccgcgggctggctcatcctgatgccctgtcgattccaattatagcgatgagtgcagatgctttctctgatgacatacagcattgcctggagtgcggtatgaatgctcatatagcaaagccgatcgatgttatagaattgacccgcttattgaaaagatatttgatttaaatcagccctcaaagtgcgtgtcctatggcacgcgcttttatatttattaccactttctatttttcatctatagaagcagattgccttcattccaattattttttcataaataattgtagatacaacaaaaggagaactggcgagagtggttccagttctccaaaaagtctaaacgaatcaccgcctgtcacggctttctatttcttatatttttctgtccccctatatgtaatcactcctttcttatctgtgcagtaatacacatcgtctgcgtctttctgattctttgcatttttcataatcttgccggaagtgttgattagatactggtcgccgttataggtaaccgcctcatatttggaatctttttctgcctttaaacgttttcccataacatagattgcgttatcttcaattccgtccgcaccggcacctttataatttcctgattttttaaatcggtactggtatgtttctccatcaatcgtaattgatgcgttccctgttgccatcgctccttccttgggggagtttccaaagtaatatacaaatacgccttcctctgaggcagttggaatatctgcctcgttttcaatttccactgccgattctatggtttttttatcatttgcaaaggtaatcttatacaatccttgaagcattttcccattcacatcaaatccatacttttggccgttaatggttttaatctgtgcttttgtcaaatctcctttcttatctgcataaaaccaatgagcttcatcattgttatgtgcttctgcatctacatcttcacttggaaccgttttaaaccagcctgttgccagccatgtttggctctcttcgttgtaataccggttgaccacattagagggtgttgcttcagaaccggttgccttaggcggtttattgtaccaatcgaattgtgccgcgccatactcattgaaccggtatttttttccgttaatcgtcttgctatctgtatctacaatcttctttccattggttttaaagtaaaaccagtatccatcgccatccctgttcacatcctcatcattttccgctgttatataactccagccagttacaaccttgccatcgtcagatccacctgcatagtacactccgcttttccacgcatcatcatctgttaccatttctccattttcgttgatccaaccgctcatcatatgaccattttcatcaaaaatgaattttgctgttccagacttgaccggcagggaaaccagttttgccgtattagcgccggacggtttttttacagcctttccgtcactttggaaataataccaccactcgtccggctcaccttcggatgtggaatcattcggaacagccttccactcatttgttatgacagcaccggtggaatttacatagtaatagttatcattgacttctaccagcctgtcccttgccatttcacccttatcatccagataataccaattgtttccagatttcttaagcgtgtctgttgccttgtcatggccgctgttatagtatacccacgtgccattctcctgcgcccagccagtcgccgccatagagaccatagtacttcccagggttatcatcatagacaagcacggcacaaaaaacattttcctcatatttcatcactccttgtagtttattgttctcaatattcttgagattcctatatcttaatctgcatactttacaccattcttaactcaatctaaataattctaaactctcaaaaaccggtattactatgttcccaattctgttccggtgttacagcggatttatcttccaaggagtaagcaatgatataatctgacaacatctttatttcccttgctttttgttcgattttatcaatatatgtcatgataaactctgtatcccactgactatttgaacgaagaatttcaatgtatatcataagtgctgtcagaggagttctcaattcatgagacatttctgtaatgatttttccgttcagtctcacagcctcctctttcccggccatttgttctctgagtgactgccgcatgctgtttaacccttctgccatggatgcaagctcattttttccctgaatcgtaatgacataattcaaatccccgctttctaatatctgtatttcccggttcaatatacaaatatatcttatgactttatgcacttccctcatcacaacaccaattaaaagcagcacggacaataaaaccgacgcaaccgtgataccggtgtaaaaccgctgattataatatcctgtcagaaatacgtagccttcttgatcgataaactgaactaaatggtatgcctcataatcttcgtaatctccactgaatgaaaacacaggcatatttttaccttccgggtaatcagaatcatacaaaagggtatctcccttgtatacttgtagcgaaaccactgactgctttttcacccaatcagcaattttgtctgtatccatgattgaaattttttctttactaataaatgattggaatgcttccagcctgcgattattctctttttgcagataaccgctttgtatgtaatagttatcaagaagggccttcccggcactttgcaatgaaacgaacaatacaacagctgacagaaatgctgtaacgatgcataccccaaaacgaaaatacatggaattgcggttcattttctctctacgttccaaagcgatacccctttccccatacagtgctaatataccgcggttcctgcggtgacttctcaatctttactcgtaatctgcggatatgtaccatgactgtactgttgcaattataaaaatacggttcattccaaacgctctcatacaaatttggggcagaaaatattttttttggattttgcataagcaggagcagaatgcgatactcaatatttgataattcaattttttctcctcttacctgcacttcattatatagctgattaatccggatttcttccatttccagatactcctccactttcttcccttccaccgcgtttttcccctgatactggtgataacgcctaagtagtgcctttactcttcccagtaactctgcataagaaaatggcttcgtcagataatcgtctccccctgccatgaaacctatcagcttatctgattctttcgccttagcagtcaggaacaggaccggtacattggatttttttctgatttcctcgcaggttctcagtccagacattcccggcatcataatatcaagaatcaccagatcaatacattctgtcataagctctaatcctctgattccattctccgcctctataattgtgtatttttcattccctaaaagaatacggacagcttcccggatatccgcatcgtcctcaatgattaaaatagtgccattattcatcgacattctcccctcggattttttatagcttgattatccttcgcaaaactgaatggtttcttaaaatctccttaacaattgtgaaaccttgttatataacatttttgcttaccttccttcagaaaatttaagaatttaattttgagacatttgtatcaaaagcaagtataataaaaaaatgaaaggaggtagcttacatggacatgggaaccattttgctcattgaagacgatgccgatatccgtgagggtgttcgtattctattgacaagcgaaggatactctgtaatggaagctgactgtggtaagaaagggcttaaattacttaatgaaacgattgatttagtgattcttgatattatgatgcccggaatgtccgggataatcacctgtgaagaaatacgcaaagtatcgaatgtacctgtactgttcctgactgcaaaggcacaggaatccgataaattattagggcttatagtcggcggagatgattatctccccaaacctttttcctacgcagagcttttagggcgggtaaaagctctgctccgccgctatcatatttaccagggtaagtatacaccatccaatcattccgctggtgaatggatagaacacaaaggcatccggatactcacaacctcaaatgccgtgcaggtggatgacagagatattgagttatcggaaattgaataccagatactgctcttattgattcagtatccaaataagatttttactactcaaaatatatatgaaagtgtatggaatgagccattctactactcctcgaacaataccattatggtacatatccgcaaacttcggcttaagattgaggaagatccccaacagccaaaacgaatttgtactgtatggggaaaggggtatcggattggataaattcaaaaaaacagcggcggcgcggttaatagaaaaacatacgaacaatttaataaagaaacttctccttctctttttaggcgctgccgcaacaggcattctttttttctctgtactgcatacgggaatcagctggggattggacagtttcttttataaatccgattatctggagcatgccgagcaacgtaccgtcgagaatttgcaggaatatattcaggaaggtgcgctgactccctttgacagtgatctcttatcaaaatgggtgaaaaagaaaaatattgtgtatctggagatataccgtaataaccgccccctatatatctctggaagccccatggatatggttcttgatgagcaggaaatcccctattacaaaaaccaccgctacacgctcaaatttgcagatggtgaagctgatatcgtattgcttggaatcttcgactaccagttttacagctctgcattgattgcagaaattttgctcgcttttgtcgtattccttgtcctgtttatcttaggtataaaaaagagaattcaatatattcaagaactccagacagcaatcagtggcatggagggcggatgtttggagtatccgattactgtaaagggggaggatgaattggctaaacttgcagaaggtctggaacagcttaggctttcccttaaacagaatatacaaatagaaaatgacttaaaacaggcaaatcagaatctaattacaggcatcgcccatgatttacgaactccattgactgcacttaccatgtatatccagattcttcagtccgatgtctgtaccgatgaatctgctaagcaatactatctggaaaaaatcatgggaaaggcctcaatgatgaaggaactgtctgacaggctgtttgaatgtagccagattcatgatgatgaagacgaaaaaccactcaacgaaacacggacgcttcaggacacatttatggattatctgtccgaaatggcaatgtacctggaaaaccgaggttttaatgtcgaggcagagttagaatggcgcgctgtatcgattggtgtacggatggattatattgcacgaataatagataatatgagtagcaatcttgttaaatatgccgccccttttgctcctatcaccttaaaaacaatctacgaaaaccatatggctggaattgaaatcgtaaatcaaattacaacgcaaaacggacaggtggaaagtacaaaggttggcattaaaagtgtgaaacgcatgatgaatcagatgaatggtatctgccagattgaaatggaacagaaattctataaaatacggctactctcccctatcatagactaaaaagtaacagcagcgaagatttaatctttgctgctgtttactgtcactgtcgtttttaaagattgaactactgtttatttccagaatcttttttactgtccgcttttttatcagccgctttcttctctccatccttcttagattttgttttcttcttttctttctcctttttattctggccattagattccggttgagactccggcgcattggttgccggtgcattggtggtcggtgcatttgccgttggtactttcgttgcaggtgcctttgattctggtgctgcggctcctggtccttgtgctgcggctcctggttcctgtgcactttgagatttatctttggcaagaactttatcctttttctttccttccgtacggttcttagtattctcgacttttttctttgccgaagcagtgctctccactttggtctcctgcttctttgtattgtcctttgtccctccgcatgccgccagtgaaaatgccataactcccatcatgataaatactgaacacttttttaaaatttgtttcataattttatttcctttctaaattttattctcaaagcatttgctttgatgatgtataatttaccagttcttccttaatcattcctaaaatatttcttaacaatcctaaactcatcaattcctcttgctgcctattttctgccccattttcacatcaacttcctgccccagtttagaaagcatccatacagcaagttctggacatgcatgctccttttgaattaaaataacaatcgtagagcctccaaactcaaaatgccccttttcaaaaccacgctgcacataaccctgatgtcttttgttttgtatttttcctacaagcagagcgcctatctccatttgaatcacctgaccaaaattttcggtgtcaataattgtgtactccctggtgtttcttacataaaccggatacttttccagggcaatggggcgtacacagtgcaatattcctggtatcttttttctggatttcacatttccattatctatgtagcaatagtggtgataatcggacggtctcagccgaaaaaccatgcaccagccaccacggtatttacacgccagttcccggttttccagcaaatcctcaattcgatatcttgaatattttgccggaatccaattctgctcatcaatttcatatacacttagcagtccatcacaggggctgattagactttcagctgtcaaatcaatgttccggctcccaggcagcaatgaacgtttaaaaaaatcgttaaaggtttcatattctttattttcaacttctgttaaattaatattatgctttttaacaaaaaaggaaatgtaaggccgggaaatcctgctgtccagaaccttccccgcctgccttgaaatccacggcgttgtcaatagttttaaacaaaaccgccctgccatatttttatataagaaacagataaatttattttcattccccatcaggtactgcctcctaccaacaaaatcaaaccacatacacccaaaatggatattatgattttacctagaaaattcggcttttcaacttttatcggaatcaaaaatgctgccgccataattgacattgtaaacatggttgtcactccattttgaattccatctacattttgaatataacacactgccgggataagaattgccgaaaccgttaccggaagtccctgataactggttcttgcctcttctgtcgcatcctggcgcttttcctccatcacgttaaaatatgccaatcgtatcaatgcacagaggacataaatcgcagataccataatgccaatcagacttttttcagccatttgatataatataatgccaggcagaacgccaaatccaattaaatcactcagggaatcaatctgtattccaaagcgtttctcttctgctgtccgttctcttgtcctggctattggtccgtcaaacaaatcacagactcccgacaacataagacaaactaatgctccattgatatttccatcacatgctatcacaattccagtaaatgcagtaagcattccgatataggtcaacacaaccgtataattataatatccaagcatctcttcaatcccttccatttatattagttaattaatacacctactccgaagctgtaaaacaaaagacaccatggcttggcagataaaattatgagcacaaattttttaacaggcattttgataacaccagaaaaatagcacaaaaaatcatctggagccaatgggagcaaaatacacaagaaaaaaaagcaggtatagctgcgtttattttgcaggcggtttatccatgtttcatactgttttgcgggaaataaattctttactagtggtgcaccataatatcttgccaaggcaaatgctatgattgaacctgcacagattccaatataattgcaccagaatccacccatagcgccaaacaaaaccgcacctacaatacagcctaaaaaccctggcaacactggtaccacaacctgaaacgcctgaatcagtatcagaatcatcggtgcaaatattccaaaccccttaatgtattgctgcaatgtttcgaccgaatggaattttccttccagaccagcttttaccataaacagacataggattacagtcactgccgtgcctcccctggccagccatttatatgaatacgtctgttccactcctctcccctcctttcctgtctccattttaaaaagcacttcttaactgtttctgaagggaatcttaaaagttcttatatgtaaaaatccccgtataactggtgccgattagggaatctaaaagataatacggcagtggctctctaacactcccgctaacattctgccgtttcttcggcatggtactcgacatttgacatcccatatattgtttttttacaacctctatgttattatatctacaatagtcagtcactggggggcaatgtgccgtagcatggggagcgtaaatctcaaggaatttacagggcacctgtcagatcatgtatcgagtacgctcgattttttcgtagtaaagttatgaaaaaatcgggcttttttaggaggcaatatgactctcaatctacaaccaaaaaagaggaagtcgaatcattggaggggtgatagttgaggatatggtaaaggtgtttaggaaattgggattttctttctcattgtcgaatactattgcaaaggggtagtgaaaaccgcttttgttatggtggaggcagattttcccgatacagagatatttcacttaagtacaccttcgcaaataatacgcaacacggtattctatgtcaataagtgcggctatcacattgtaaagggcatagaatttggccctgcatcaaacactgctgactatgtttttgaaaagaaaaacttttttagaggtgaaaagaaatgatacttgaaaccgaaagactaatccttcgtccattccttgaaagcgatgcagaagatgtatttgaatatctgcacgagcctgcggtgaattgctttgcctgcctaaagttggatacgctggatgacgcgaaagcagaaatgaaaaagcgtgtcagtgagaccgagtatcactttgcgattgtattaaaggaaagcggaaaggtcatcggagagattgacggttatcctgagtcaagcgatccagatgacccgtaccctgcaaatgatactttcagcccatgttggatgctgaatctgaactatcagggacacggatatgcctatgaagcggcatacactttttttgattatttattccatgacaagaacgcacgacgaatctatgtctatacggaagattataatattcactgccaaaggctgtgtgaaaagctcggcatgcgtcaggaaggactatttaaggaattcatttcttttgtcaaaacttcagatgggatgccaaaatatgaaaatacatatcaatatgccatcttaaaaaaagaatggcctttaacttgtaagaaacagaacagatgtgggtgccaagagcagtgaccaccaccagcaaataattgacatctactatccctttattggggatgtcagtgcagcacagcttgtgctacaactgaattgaaaggaaatgcccccaatttgagttagtattcaaattgggggctataaagccacaatataaaattttagattcagggtatattagctttattagcatactgtgatctcaataacagttttcttagttaacaaactgactattataaagctctgcgtagacacctccttttgccatcagcgagtcatgattgccctgctcaataatgttgccttgttccataacgagaataagatctgcatccacaatagttgaaaggcgatgggctatcacaaacgatgttctattcttcatcaacactttcactgcacggttaatctcatgctcagtgcgggtatcaacgcttgaagttgcttcgtcaagaatgagaacggcgggattgcaaagcaccacacgggcaatcgtgagtagctgcctttgaccaacagatatactctcagcatcgttatcaagcacagtattataaccgtccgacattgtacagacaaagtgatgcactcttgccgcctttgccgcttctttgatctcatctatcgttgcatcgggtttgccgtatgcaatattctcggcaatggtgccgccgaacagccaagtatcctgcaaaaccatgccgaaatgggagcgaagttcttttcgtgtcatggatgaaatgtccacaccatcaagtgtgatcctgccgctgttgatttcataaaaacgcatcaagagattaataagcgttgtttttcctgctcctgtcgaacccacgatagcgactttttgaccgggcttcacggtaaagcttatatccttcatgagttccttttcggaggtatatccaaatcgaacatggctgaaagatacctcaccacgaacatgattgagtgcttctgtatgttctgtttcagagctgatttccacttcgtccaacatattgaatacacgctctgccgaggcgatggcagactgcatggaatttagaatataagatgcctgtgtcagcggttcggcagattgattaaggtattggaaaaatgcttggaacgcaccgacagtcagttttcctccgatgaggaaataacctgctaccacggcaatgattacctgcccgaagcggttgacaagacggatggcgggattaacagcgttcattacaaaatcagcttgctctgttgcttttgccaattcgtcgtttacacgatgcattttctcggaactgattttttctctaccaaatgacttaatgataatgcggcctgtataatattcttctaccatacatgtaacagcactcatcttctcctgacgcttttcagctttggtaaacatactttttgagaaaatggatgttataagcatggaaagccccataaagcccataaagatcaatgttatgatccagttaaaacggagcattataacaagcgagcctgcaatcattccgattgaagtaaggaatttaagcagtccgttttgcatgacctctgaaagacggtcaagatcatttgtaaagtgtgtcaatacctcgccaatcttatgctgatcataataagcaagcattagtctgttcagcttcccactcatctgcattcttaatccaagacaaatccgttctgaaaagctcgccattaggaatgcttgcagcgtactgaatacccacgaaccgaaatagagggtggcgagaattaatatctgcatcccactgttttgccatgtaatgcagaaaacctcacctgtttcacggcaagccttaattgattcccaaagcatattgaccagttctgcactataccaaggtgcggctatggataacaccgtatagataataaccgagcagagaacaacgattagtcgccctttttcatgtgttgcactcttaaaaaggcgtttcagtacctttgctggatctttggctttaccgatatcaaagtcactgaatgacatatcgggatcacggtcaaatagttctttttcatcagacattaatttcccctcctctcgtttgtgatttgacaatatctgcataagtcggacagcttgcaagcaattcttcgtgcttgccgataccaactgccgccccctcctcaagcacgattatttggtcagcagaggtaatggtactgacacgctgtgcaataatcagtaccgcactgtcggcaactgccgttttcaaggctttacgcaatgcggcatcggtcttgaagtcaagtgccgaaaagctgtcgtcaaatatatagaggtcagattttttcatcagcgctcgggcaatggcaaggcgctgcttttgcccgccggagaaattggtgccgccttgtgccacacgggaatcaaggtgatttggcagttcgcggacaaatcccgactgagctgtatcaagagcctgccacatatcttcttcggtggcattttcattaccatagcgaagattatcagcaatcgttcctgaaaagagccaagccttctgcggcacataggaaatacgggagtgaagctcatctctcgaaagagtacggacatccgttccgcatatacggagcgtgccgcctgttacatcatggaaacgcataatgagctttgctatggtggatttgccgctgccagtagaaccgatgatagctgtggttgtgccacgcttgattttgaaattcaatccgtgaagcgttgcttcgtcggcatcggcaaaattaaaatccacatcatcaaacacacaaacgatatcggcatcatcatctgctgtgctgttgccgtccttgatgttcgattctcggtcaagcacagcaccgattcgatttgcacacacgatggcatgaggcaaaaacatcatgaccataatcgccatcatcacataaaaaagaatcagaatggcatattctgtgagcgccgtgatatcaccgatttcaagagaacctgctcctacacggttaccaccgacccaaacaataccaacaatgcagatattgattacaaacatggtgacggattcaagacccataaaaagatagtttgctcttactgcataatttgcatagctctcaaaagtcttgcgtgttctatcttcctcaaagtgctccttgttgaaggcacggatgacacgcacacctgaaatattctcacgaatgaccacattgatgcggtcaatagctttctgtaatttatcaaacaatcctgctgctttttttgcgataatgacggctgtgaccaaaacgatcacggtaacactgagaagaaatgctcccataaagacatccttcataaatgctaagattacagccatcacacacatcacaggaaccggcagtatcatttgtatggtcataatcagtcccatacctgccttattgacatcattgagtgagcgagtgatcatggagcttgtgccaaaggtttcaaaatcgtggtcgccaaaggtaagagatttgtcatagagagcatttcgcatatcccttgtgacacgggcagagagccttgcaacaagaaaacttccgagaagcgtaccaataccggagagcagagctgcaccgagcatcaatacccccttttgataaatatactgtatgtcacccttcaaagcaccaacattaatcatgtcggcaacgagtgtcggcacaaaaagtgtgccgattacatccaaaaccataacaagtagcgttaaaaagcagagccacttgtacggtcttataaagcgtaaaattgttttcattttaattgttttcccttttattgaattgtattgtgtcaaaaactgatcggagcttctgcatccatttcctattccttgacttatcgtaataagatttatgttcttcttactgaaatatagtctgtgttacagactatatgatcattttttcccacatttctgtgtttttatttattgagttcatccgagaatacagatgaaaacttttcaagaagtcgtaagaaagctagtttctcgtcctctgtgaattgctcaatgcttcgatattcagcatctttaattttaggtaatggcatcaacctattcctctgtgccccaaaggcctcctgcatcttttttgaaaacggggatttcttaatttaaaaatatattcatacttcaatgctccttctcttttgtatttatactatgatatctgtatgataaatgtaattatattaaccgcaattacttaatcacattctgaagcaaatcttaatctttctgaaggagtgcaattcatttttgacacctacagaaagcttaagtatgctgatgttgatgattgtcgcatccagtatccccctatcattctgattatgataaaattccaaacaattcccccaatagctctccccgccagtatggatctcatcatatttaagagacacttgtattatttatatcaaaaaattttaaaaggcagaatgcacggctctataagcctgcaatctgcctttttgtttacttcatattaataatttcttttacgcgaatttgagccgtcgcataatccctatattttacatcttcctcaaattcccgaaaatatgtctcaaacaccatttcttctactaactgattactgggagcctcttcggcactactcccatatgttccataattcaagctttggtatccataacttttcaggattgagtcaatctgctccataaaataatcctacagacaaatggttccgtgggaaactgtgtaaaatacggtatctgccaaatagcggtttatctgcacaagttcaaattcttcaggtccaagatatctgcagaattgcgcacagtcatcatctgtttcaaaccagccatacatcctgattggttttactgccaggcaaattccaccgtctgccctccattcttttatagagttattttccttctctttcagactgtccattatttcctccatatacccgcttaggaagcgaggaaactaaaaatatctatctgccctggaatctgcggctggtcttctatattcttatccggcttcttcctggcaggtactacctttaccttctcccgctcctctaacaactggtttactttgccgcggcactcattcaaaagctctacataataatccggcgactcatgcccccgcatcagcacatagtccttttgctcaatggcattttccaactgcttcacataaccaagagcgtaatagatgcctgaccggttccgctctttctcacttaattccgtaatcttctgggtcagccattgataatttgtattcgcctcataaatctgtaacgatttcagagcggcagccaaaatctcctgtctctgcgccatataacggttgtcaaccatggacggtgtattcaactggtaactgggtgggtaatcctgttcccgcaggcaacgggtaatctgacgtttcacagaaataatacgttcccgcagaagatttaactcaaaaccatccggaccattcaaatcctgtcccccgtatttataaatctgttcccatctggaatgaagcacctgcagctcctgttcaaattcctccgccatactgccgttttctcgcttttgctcatcactggcttcccacgcattgcaggactgacgttccaattcctcatcagactctatcgggttgtgaatcgtcccctgtaccagacatccgtaataatatcttccactgttatccggtttcacttctttacgcttcttgtccaatgatgcacagtttttacatctcactttaccaatcatacagccactcctttcaggcaatccttttctccgccccgtttacagcgtcggaaaatggtgtatcctcagccactacccagccggtatccccttccacgcagccatacaattcttccaaaaacatatagggcagtaagataagattgttctgttccgcatatctgcagccgtactcccgttcatcaaaaaacactgcatgaccacactcatcatagtaatagcagtcctggcccagcacctccattgtgtccggccttatcaccagggcatactgatacgcatggttctctcccatcgcggagatactcacagcggtttttccatcaattttaatcattgaatgactcctttcttacaaaaatacgtttgaccacttttttatttagccggcttcttcaaaccccccatcatcgtaatcaagctcaagctgtccttccacctgcttttcctgtttgggattgccgtacatccaccactggaatacggcctcgccgctgctccagttaccgtctgactttccggcggctctccttgctgccaccatacggtcaaacgtatggatataagcttcctgaaacttcggataccgtttgaactcccattccctgctttttacggaggccagcgggcagccgatacagccaagcctgcggaaaccgcagtcatagagctcgcaatacggaatccccagagaatgaataaaaagccacacctcattctctgtccagctaatgataggattcagtaacctttttcccttcagctgacaattttcaatgagcctgcggctttcttcattatcattatttaaaattaaatctggcttcctgcttcccagcacctcaacggcgccgcgtttttccctcttacggctttcctgccaccgcaccccggtaaccacaaaacgcccttcgccgcctgtctctttcagcacattatggaaagctttccataagattagttatgacaagttatgtgttatggaaagtttttaagaaaaaccaagtaattataatctttgctggtctattgctttccataattctggttgaatttacaatgcgggtagtgtttactcaaatggaaggctaagcctatcataaatatcggaggtaaacacaaatgaacaaccacaatcatcaatcagactctgcattatattctcttatgcttggagctgaaaatgagctacgtaagctcaattactctgattccaccatccgccatcgttgggaagtctggaaacgctatcttaagttttctatgaaagaagacttccagcaacaggattggcatgactttttgaaacaagtctatgggattgaagaaatacagggagaacttacacgcaatcaacgcaccgcgcgggaagcttttcagacgctctatcagttttataaagatggccgcttacagcattggagcctggtccggacggatacggaaacaattcctgctccattttgcaccattgcggatctgtttcttcagcatttaaagacaaatgggtatgtgccgtctaccatctcagattatgccagaacgctgcggcgtctaactaagtttctccagcaggagcaggtagaatcctttcgtttgcttaagccggaatatatcaccccctttattgcgactgttgccagttatcatggccgttctgttgccgccctactaagtgagctgaggcagtttttccgctatctgtatctcaatggacatcatgaaaaggatttatccctttttatacctaaatcgaacatcttacgctccagggagcatcttccttccatctggagtcctgaagatttggaaaaaatcctggactgcgttgatattggtaatccaattggaaaaagagattatgccatcatactgatggttgcccgcctgggattgagggtaagggatatcatccatatgaaatatgaaaacattaaatgggagaaaaactgcatagagcttgtgcagtttaaaaccaaacagccgctgacgctgcccctgtttgaagatgtgggcaacgccgtcattgattatttaaagaatggccgtcctgaatcgccggttcctaacatttttatttgccacagggttccgtacaatgcttttaatgaaaacaaccgtctctaccagatgctgaacaactacatttacaaagccgggattgtggttacaccagaaaaatcccatgggatgcataccttgcgccattcactggctaccgaattattaaaaagagaagtaccccttccggttatttctgaaatactcggccatcaaagagtggagactactgcgaactatctccgtgtggataccgagcagctgcgtagctgcacgttatcaatggaggtactctaatgcagatcaaagaaaaagattataaatttattagtagtctttcacaatggatcattgggttcctggaagagaaacaccgcctcggctataaatatgagcgcgaatactttgaactgaaaaatctggacaggttttcgcttaactacgactgtattgacaggctgcccagagaactcgtactcgcctggacacagcgtcaggcaaaccatagcccacagacgacccattctaaagttaacttaatacggcaacttgccatgtttatgtctcggaatggttgcgaggtctatctgtatcccaatagtatgattccaaagaggacctatgagcatagcccctatatttttagccatgacgaaatcagacgtgtattcaagacgattgacagcctttcgccatcctgtttctcaattcggcgtcatttaatccttcccttgctgttccgcctcctttattgctgcgggctcagggcttctgaggcattaaatctgaaggtttccgatattgattttgaacacggcgttatttttatccacgatgcaaaggactatagggaccgcctgattccgttaaaccaggacttataccagcggtgtatggattacaaagaatacgttttatccggatttggtccggaaggatatttctttcctgcgcctgacggtctttcctatcacatttttacaatccgtaaaactttccgggatatcctctggaacagcggtatttcatacggagggcgaaatgttgggccacgcctccatgacctgagacatacatttgcagtccacagtctccagaaacttcttgaagaagggaagaggcccgccgaggtcctgccgattttatccacatatatggggcacaaaacatacaaggggacttcaaaatatcttcatctaacttctgaactatatcctgaaattttggaaaaaatggaagcggcttttggaggattgctgccggaaagggtggaagccgatgaacaaaccgactgattttgcccgaagtctggcagactatttcactaattatctggcaggtcagagaaacttaagtatcaatacaatccgctcttaccgagatacgttctgtcttcttctgacctatttagaagaggagcagaactgttcgccggaaaaagtacagttgagcagactgacagaccagaccatcaacgaatttatggcgtggttggaggacaagagacacaattccatttctacccgtaatcagagactggcggcagtacatgccttttttcggtatctccagcttaacagaccggatatgctcttgcaatgccagaaaatcctatcaatacgtatgaaaaagcatgaaaaggctgtggttaattatttatcagaagattcactaaaaaaccttttatccaggccggatcagactaccaactatggaaggagggatgccgcgctgctatgtgttttatatgacaccggtgcaagggttcaggagttgattgatttgtcagtccgtgatgtgagacttgatgaacccagtgtcatccgcctgacgggaaaagggaggaaaacgagaacagtccccatcctgcacccgacagcaataattctaaaaagttatatggaaagacacggattaaatccacaaaggaacccagatcaggctttattctgtaatcatcagggaaaacgccttacccgccctggggttacttatatcttaaaaaagtatgccaatgaactacaggccgatgggaacctttcaaatgaatcggtaacacctcatgtcatgaggcacacaaaagccatgcacttattaagggcaaatgttgatctgcattatatccgtgactttctaggtcacatcgatatcaccacaacagaggtttatgccaaagccgatgcagaaatgaaacgggcagcttttgaaaaagcagacataggaatttcaacaaatgaaataacatcatggcaaaaaaacgatgaccttttgtcttggctgacaagtcttggacagaagtaataaatgtattatggaaagaaaacaggggaaatgtcctgtagaaacaagaatttttcctgttcctttccataagtactttctttctataaagcacgctgcagcaatatctggcgttccggtagggcggaagctgctttttgacaatcaggttccacattgtgattggcggcctgtctatgatgacatccggatacttccgcctgataaaagataccagttccggcggatcgaccgttgttaaatggtaatgcgcttcaaaccggacgccggccatctttgccagatgataaattaccaggctgtcctttcctccgctgaacgccagataatagcctgccgggtccatagccagcgccgccccctcacacattttcagcagctacacggccgcctgtactttcttctcaataccgaacagatatagttgttccattccttcccatccttcgcatgaattttgctatggacggaaaagccattcttaacggtgtgtctttttacgctgctaaccgactcattgttcggaacttcagcccgcaatcgcctgattcctaacagcaacccgtatgtttatacggggaacgaagaaatgaaacgtatttatgaagcaagaggaagtgttgcaaatgccttcagcttgatctccagaattttgacattggaaatcttccgaaacggcctgcgcctgttctcctcccccacccagtcattgaaaatcatatcaatctctatatcgtaatcgtcatgggcagaccgtaaaaacacatacttttttccctggctaaaattcccccggcaggtatcatagcagtatgtgatttcaaaaacaggtatggtgattctggaagtaagaatctgcctcgggtgcagttttttaaaaaattcccggtattcttccgtggccggcagggtgcctccgattgcattctcactaaatgtcaccatctcggaaaatttatgtatatgcataatcttcactccccggcaccgcaagcactcgttttaaccgtttccgcattcggtataatctcccataaatcccggaagcagtgacgccacatgccgtcccaatctcctttcctgtaaatcccgcggccctcatacagaccacctctttttctttctctgtcatgtgggccatagcctcctctatcatcagtcgctggaataccagttcttcactccttacacttttggtttcaatggtttccgaaagcgtcagcccctggtcctcatatacatttccattgagatcaaccagataagcctttcgctttaatctgctgttataccgccagtagtcaaacaggctgtcactcattttccttgacgctatggttgtaaactcatacttcctggttctgctgtcttcatggtacacctgcacagcgcttaaatagcctaatgccagcacatcataatattctgaggagcttaactggttataccgcaaaaagtcaagcacaaggttatggttctcctccgcaaatttcttctggtgttccgtcaattcgtgcatcatcccgacgcctccgttcttcctctattttttcattctctatctttttaccaagtcctattcttctctttacagtagaaggataacagccaaacaaatctgcaatactgcgtatgctatagccttctttatacagcctggacatatactggctgacctccgccttattcattttcgtaaagttgacagggggcggccgctttctcaatatcttctggcaaaccggatgattcggcccgtattcatatagatatctggcctcgttggcatcaaagtttccaagtattgcaatgagcaggcaataatagccttctatttcttctccctcatatcccattgcgccttcctcttatgccacctggtatgccagacggtaattccctctgccatctgtctgaaactgcgagcggtgttcatagatacaggcccggattctctccctgaaatattggtttttcttagcttttgggtgtttttcgagacattcgtaaagattctttaaagacatggtgccgccctctttttccatgactcccctgattaaatgaaaccaagtcaaggagacggaatcactctgttccaggttgcaggtacctcccacccggtaactgaatggaataatcagatactcctctttcttaaacagcagaaggtgttccgtgacaatcggtataaacggcttattactgtatgttttactgctggaacggcaattatattggcccttgacaatccacgataccagcttgccaatcgacatcatatccgaggagattgaatggaaggtttcccgcgaccggatatctcccaccaagaccgccaggtatccgccatgcctcaggctgataaaaagtttttttatgataaagttcagcttatcaataaaatccttgtagctgtcgcagcggctcaaatcatctgggtgcgcctttccccatacccggccggaatattgaataatagaatgatatggcgggtgcagaaaaatcatagacgcactttcgtccacttcatcttttaatgcattccagtttcccttcccttttttgggttttggattcaggtcataaagaaccgaacgcacgccctcctgatccgccacatctccactggtgccggagcctgacatgggatcgagcagtacaaaatcctgattttgctttccctcatacgttctgcattgcaggatatgttttaaaattgcccgcaccacttcgggagaacaattcccacgccattgattgctgcccccttgtttccgatccggaaatgccataaacgaggtcagattacgcccaacacagctcgtcaggtcctttgttcccagatactgcacaatttctctccagttctctccaaactctttttttaacaggttttctgccaaataaagttcttcctgtgtcataatactcctcctgcacttcgccgcgtccatctcccgtaaacaccttcaccatcatgcacatggtttctggagatgactgaaccacaatccctgaaaagtcactccccagcgatttaagttcctcccgttttccgcgcaccaatgattttgcaagcccgaattccaggtgttcacttgataccatataaagtttggtatccggattaagacggaaattcactttctttccaacttcaaagtcgtatttgccagccataattacctgcaggctgattgatgttctctccactttctttcctccattaaaataatgggtagcatgttaaaatccggaatccccagtctgcgtcttggtcttttaacaggaccacacaggctttcttcaggttctcgtttaacatgtctatcccctttttgaatccatagccgaccggcgcgggaaaattgccgcgcaaaggcagcacatcccgggtggtgtccaaaagccattcccggattacaggattgtaaaaccgcttcatcaggctcttaacaaccgctactgctacttccatgtcccaaaacgatgtggcgtaaataatgtcctctgattccagacgtgttttcagcgccagcacttggacatccgtgtgctttctgattgtgtggcctccataaagaccaacccggtccaaattcctttgaatcatatccaatgtggtctctattgtttcctccgggattcctgcgaacaaatctgtcatccttaactcctttcctctttgcggataaaatacacaggtatcccggacggatctctgtgatgatggctgttccttccatcaaaaaaaccaccggcagctgccaatggttcctatttatccgtcaaaggatttcattctcttattttgttttacaatttcctatggtctttatttatttctgccctcctctctctttctctttacagcgcgggacgccttcatggcattccctgcgattccatggaaataaaaaaagacgccaaaatatattccaattttgacgtctttctctctgaataataaggccaaagcctgatgtgtttgcttccggcacatttccggaacaatgtttatctacaatgaagcaacattgtaaaaatcaaatccaagtacagtttatcactatatttagtatgtgtcaacaattatactcctgtatatagacattattactgttcttctgtgctttctgtatctctaacagcccgcctcttatcaggaacctggttttctcctccgctcttgagccagtaccagcgaagttcatgaatgccgtattcaaattcaccggcaatcgcttttcttactgcaacggatagagcttccctctttttatgaaaaaccttatcgtccgtttttttcaactgtttcaagagttcatatgttttatcactaatcttagtaactggatagagagacatcagtttctgactctttacacctgaaacatatgggaaatggatattatcccagacaatattctctaaatcccccatcctgattcccgtctccttcatcagccggaccgcacaaagcacttctgtatctcccattctttccaggctggcttcaagataattgatcttgcgttcctcgcttttcaccgttctgagggtataacgggagaacttttctttctttgtatgtccttgcaggaacctgataatctcgaaagcaaagtgatcaagattctttgtttcctcatatattttccagagccagtcatccagtatgtgccacgtataaaaaacatcatccctggcaaatatctccgccaggcgtggcttcagacgctcaaaccgacccttataatagccacgttcataatagccataaatttctcctgcacgtcgttctatcgttaataacatttcccgtttggcctttaccatatccagactgataccataaacagcgtatctcccatcaaaaatacttactccataagtgaaactgaatttatcatgaacttttctgatactgccaaccactgacataatcattttcctcctatcatactgtgtttttacggttcatcttcaagcaactgttggtacaactcctcaatcctgcacctgatatcggctttcgtctgaacctcatccttattgtgcattcccagccgattgagaatctcaattgttttcagctgctcaatctgtatcatcatttcttcccggatttccttgtttgtcatggcttatgcctccttttaccattacctatccggattttcgcgttttctgtaaaacaatcacatttttattcaacttgcttttctgttttccgaatcttccagtgattcagtccggtcaagatatcgtacaatctcctcggtctgacctgaaagttctttttttaccagcagatacagcttattaaacagattaagcaaataggaccggaacgcatattcctgttcaaaagccctgatccatgcctctgctttggcaaacagccggaacatgtccatatcactgatattgatggatacctgggcgtcacaaatataagaatcctttttacaatacttcccgccatttgtatttctcacggcaattccccttccattttggatctccgcaaaccatggataccggcgtttctctcctcttgtgtcagcatcatatctttttatggagagttttgttacgatactcatcccatcctcatctggctccccaaagatcttctcctgtggaaaatcaacatacaatgccccgcaaaaaatcctggaataaataaacttcacttcctccggatttatatgagcgctgacgctgactgtgtggttgccggttccctggctgtaatcaagcatgataatctgtatgagcgaacgcgcaccttcctccgcatcttcccccatcgcatggatgtgggccggaaaaagccgtgaggccggtttcaatttgtcgttcagctccaaaagttttttatcggtcttgtagacagcaatctgctttgacacctcattcttccagtcacgctgatcattttgtcccatcacttatctcctatctcaaataactgactattttctgtacaatacggaccggcagcatggataattccgaaatatttaggaagccatcctcatagatttcctctatcactttccggtcttctccaatcgctgctgcaaagagcaaaatcccgtcctgttttaattccttcttgagcgactttaagtcctcttttgccaagtctccgctataattcagccctgacggctgaccgtcagacgctaaaaagaatagttttaattcttcctgtctggtttttaaacgctctgccacaaaacggattgccgctccgtcccggttactgcctcttggggacatatccatgattcgatatcggtcctgtccgtcaatggagtcaaattccgcataagcgtacaggtccacagtctcctccatggtagtccagtccatactggtggaatgtccataaacaatcacaggtattcccagattcacacaaacatcataaataatcaatgcggcgagacgcccgtaagtaatccggtccccataacccatcgaaatggactcatctatcagcacagctatggccgcctgcttcccttcctcagagattttccttctcataaagattcgcttgtcctggcgataaagcctggagctatctaccttcttgcctaactgcagatttttctccatatattcttcctctgaatagagtatctcgtacatctcctcccacagacgttttgcaagttttaaaatgtccggtgagaggctgtcatacatcttccggcactgaaccggcacggttcccatccgatgaacctcaatcgcacagccggcatgaaccttaccaaagtccatggtttctgcctggtcttctagcgcctttaccaccgctttctcctgttccttctcatatttttcctcggccatatcgtagagaatccgattcatgtcctcggctgcatcaagatatccatttccatcgtaatcattatccttccaaatggactcttctccctctgcggcttcacaggcactttctcccttaaaccgtccgccttcctggttggtaaccatcggcctggagctttcacgaaacagctgtaaaagtgcatttaacagattttcttcctgagcatcttcctgtatatctgtttcctcaccagtcgttccttctgcgctctccaaaggctcctgttcctctcctgaaccatcgccttcctgctgctcgccatcgtcaatttctgcttcactgttttcttcctcatcatcatcccattttccgtcccattcctccgggatatcatcgttttcatcttcatccgcatccgggaccgatgctgctacacggctaaatatctggttgaatatatcttccgcttcctcctgtccggaatcctggctatccgctttttccagtgtttcgccactttcatcttctaaatttccttggttgtcagttttttctgaaccggtatcgtctgctgattcctgctccttttcatggagaaagtctatcaaatccttcatataatcccagattttcagcagaagctgattggaggccctaaaccgctccgtctcgtccacatccactacggaatcgtcaatcacctccatacagtcattcagacagtccaaatattccccgatatagccttcccagttattgatttcccctgctctggcataccctaaaatcagattcaggataattgcaagaccatggtcctgctgctgtatctcctgcgtaacggttggaagcttttctatctgtctgttggcattcattagaatgccgttccggacgctgcccggatactcgtcacacatacggatttctatataaacgtcctcaaggatgttctgaatacgcaaagcggtatccgtaatcacagatactgccgctttgtctcctgcctgcaggaattctttcatttccgctaaagcattgctctctttttcattttccggcactggcggccggggataaattctcccttcacgaaatccatttccatacacattcctaagccccatggccgtgtacctctgatgtccgcattcatgacccagaaatcccaccaggctctctgttttcaattcttttgtgggaaagctccgtgtaatttcatttgcagcattgatatacaccagctttcctcctgtgaaggcaatcttggccgacgggccggtatcccagcccatcgtaaccttaatctttcttccagctttccagaccaaagaattcgcaatcttttccatattctttgtgaatggctttgaagtaaaaatctgtctgtttgtaatcttctttttaatgtccctgattcgggaacggtcataacctttctcgcccataaattctcctttgctttatgcagccgcctgcccttcagaatagcttaccttgatacaggtatcgtaaatctccagcctggtttcccgatctgaagctgctttactcaggattgtatattttgccgctttcagcacatcacccgataccatgtacgaccacacccaggattcatattccctgtagccgcaaacaccgcctctgatccgctcttttctgcaatactccctgattttttctactgtctttgccatctttagaagcatgacttcatctttacagccagtcttaatcacggcgcggtccttcatctgctctgccgaaaggtcttctttgtcaatgaccatacacatacgggataaaatagactcattcatttcccggcagcctttgtaatcggtgtttgttgtcaggataatcaccgtatccggatttctccggatggtctctccatttgccagggtgatggaagcacagtcatccagcaggccattgagctttaccagcgttcccggctttccaatcacggctgcttcctgcagctcaaacacagcaggacggcggcatgcttttattaaatccgattccaccatcacaaagtctttctggtccttacaactctcatagccgctctcatacattttccgcatcagcttctcaaacgcctgcttgatatcaatgtcctcctcataatctccggtatattcactgagcacggtagcggggtccatcataaactcctcataatcaggcagtaccatctgctctgtctccgcccggtggctggtattgggaaccatggttgaaacaaggtccatctcgtccgtaccttcggaacaggtcaggaagtaatacggaagccccagtgctttagccaggattgcaacgtcaatcgtcttccctgtacccgaatttcccctcatcatgaaattccgcaggggagtgttcttaatcatctcaagcatatcctgtacttcctccgacacatggaattttggagaaacttccggaacacgcgccttctcctcctctgtcaattccacattcatgcggtatgtattgcctaacgtgtcaaacggtcttgatcttgcagtaatccggtttacacacaggattgcaaactgtcccgccacgacttctgtaggagcatactgtccctgtgcgatggcctgcggcgttaaaatcggagcatttccagatgccagcgaatttctgtcaaccgggattccgttagttcccagcgtgtttgccttttccactctccggtaaatattatcgcagcagacgaatgccgcctgcagggcctggtccatgttgttccagccattttttaactgttctctgaaaactgtaaaattttcataaaattcctgattaaaaacaggaccgtccatattcaggctggcatattcaagcatacataacagaggctttccgtcacactccccggcccgcagcgccggcatatgtctgtggattccatttccgctttcacagaccttgaatttacccgtcctggagttatatacaacaactgtcctgtcatcactatccttattcttaaattcaccgcagtaaaattcaatctgtcccgtctcatttttctgcacgccaatggcgccgtcattatccgtttccaaaagttccgccacgctgagcagcgcccgcaaaacagggccgtgaagtgtagattgccgccctctctgcatctcattatgttgggaaatatgccgctcctccgacgatgtcttgttcattcccaagtcggaaagagcctgagcaaacggctccggcaggggtaaactgaaggtccagctctcaaatagctttgtgtatgccatatcaacatcctctttctatcagcatttttctcacatttcttccatttcttctaaagcggccggcgtaaaatccataatcggataggcacagtagccggaatatacgtctattcccagcgattttgcaattccctcatgctccaggaatgtaacgattcctgctcccaaattattggaatcaaccgctgctaagttttctcccagtttttcaatatttactgtaatattcgcataaggctcccctggtctgccattttccgctaaaaatgcctgtactgccaggttcccgttctccaaatagcttcctttcttcaagataatctgaactgttcttccccactggtttttataagtataaatcttcatcaattttactctccttttcttttcctatctgttccggaacgcctctagcttgctatctgattgctgcggggctttccctggggcttcatcttttcaagcctcagcgcctccgcctgaatccggtatgccagccgtgtatttcttttttctttatcatcgtccattacagcctcacaaaaagcatcccagcttccaactaaaatcacttcgcaccgtgcccgggtcactgctgtataataaatgttccgttttaacattttcttaaagcacggtagaaccggtataatcaccgccgggtattgcgctccctgcgatttatgcacggtcgcggcataggcatgctccagtatcccatagtcttccgagccatattccccgattctcccatcctcaaagcggacagccaatgtctggcctccctcctcattctgataaatatctgagacaaatcccatatcgccgttggatatctcatccacatttttttgctgcatcaccttatcccggagccgaaacagcgtacctccaagcttcatctccaggcagcctggaaactgaggattgaccagttcccggagcctcttatttaacgcattggcacctgcctgcgtatcgtgccggaagggtgtgagtacctgtaccatatccgtatccccaaggctgtccttcaattttttctgatacaaaccggcaatcacttgagcagcactctcatcgctgtctgctgctataaactgaaaatcatcaccatatagaaaatctgtctttccctgattcattttcaaagcattgatgataattctggacccctccttctggcggaactgtacatccagaaccgtaaccggaatcaccccagagtcaatcagctccttaaaaacatttcccggcccaaccgaaggaatctgatccggatcgccaatcagcactaccctggctccgttcttgaccttggatatcagcacataaaaaagccacatatccaccatggacatctcatcaacgataatcaggtcctcctccaggtcctcgtttaagtccaggttcagttcttcctcctctcctgttatgtagagagccttatgtatggtcatcgccggatacccggtacttgttaccatattgcggctggcccttccggtgggcgcacataagagcacggacttttctcgttcttttttttcaaatacttttaaaataattttttcaaccgtggttttgccggtaccaggtcctcccgtaatgatggacaggctgtttttaaatacacttctcacagcctccttctgttgattcgcaaggaccatatgcgtactcccctgcacttcgtccagctcccgttcaatgtcacagacagactgcctgttccccataatcctcagaacatgtaccgcagccatactttctgccatataatttttcatagaatacagaacatgtccatctgcagccaaaagctcgtcagaaaacaccatctcattgccaatatctttgattagccgagtccccacagcatgtctggaaatcccataattcaataattttgctgcctgttttacaatgatactgctgtttaaatataggtgtccttcaccttccgcattttttaagacctgaagaatcgctgcttttatccgcagcggttcttcaggccggaatcctttgttctttcttgcaatgatatcaactttttcaaaattgaaaccgcttaattcgcaaagccggaatggtttttctctcacgatctgcattgccttgggaccaaagtgatcacggattgccgaaactcttttggggccaatctttaaaggagccagatactgcatgagttcacgcagggaccggctctccaaataggattgcataatcgtctccagcttcttttcggtaatcccctttacttcaagcagtttctcaggctgcatatccataatttgcagagttgcttcgccaaaccggctcacaatccggtttgccgttacagggccgattcctttaatcagtccggaggccagataacactccattccttctttcgttgtcggcatgaataactggctttccgccaccgataactgcaatccatagcttgttttaatccacttgccttcaagtcctgtctcaatcccttcgataaatggaagcgctgttcctatggctgtaaaaattctttctccatttttaagaatctgttctgtagcctcctttgggataaatgcaaatgttcgataggacgctatggtatatccgttttcatcgttataaaatattttgcggtgtggcgtacactgaatcacacattgtacctccgtttcatgaaccattccatgacagataaatatatttgccctttaccgatgcgtgtggtattccatcgcctgccaagagacggcagatatgctctgcctcctctccaggatactccggcagacagcccacacgccggtacccctttgctgtcctgatattgcagattccatcctttctcagccagcattcataaataccccggccgctgagattagatataatctggttgagacgttttttaccaatgtccccataccaggaaattactttctgcgattccgcatcattatcatttaaagtttgctctttcgtctccactgcctcagcctcggcttccgctactgttaccggttctgtctctgtctccgcctcgttacttacttcagcaagcgtgcctcccagcaatgaaaccagcccttttcgtccacgttttaacaaatccagcgcccacggatttttcagggcacacaggataacaaacagcggtattccaagcgaaatgacattcactgcgattccaagggcaaacgggagcagaaatggcaataaaatactgcatccgattcctgctgataccagtaaaataaccttcctaatatttctctgttccatctttatcctccttgtatgcaagaagggaattgtcctcccggaagcaactgcttccaaagaataacattcccttctctttatcatgatttaattaaatggcagtgctccgtcttcgatgccgtcatcaatattcataaaatcgttgctggcaggagcatttctctgtgttcctcttgcggttgatctcgccggctgccttgctggctgtctcgatgcctgtcttgccggctgcccggatgcctgtcttgccgtccccgatgtctgtcttgccggctgccttgatgcctgtcttgttgccggctggttagacggggcttgctgagcgggctgattttccgctggtgtcccctgcccaccgctatcttcgctgttgtttttcttactctctgcaaattccacatcgtcaacaacaagctgcatggagtagaccttctgcccctccttgttgacatagttattgttctgcattttcccgctaagaagcagcttcagtccttttctgccaaagcgctctaaaaactcagctttacggtcaaatgccgtacatctgaaaaagtcggccgtcggctcattatcacggacggtcctccggtctacagcaaagtcaaagcgtgcaattgccattgcattctctccctgggtataagaaatctcgggatcggctgtcattcttcctaaaaaaatacatttattcatgctctctctccttctgtaccatgtatccgttttccctgcactccagatatatccactcctcggtcttactatcccatacttttatgttgtggccgataacgccctcctgtaccagatacagactctttgagttctccgcctctgtcagaaggtttttgattcgttcgctggtaaggtcagctccgaaatagtgtcccggaaagccttttacatagctgtgaaccgccccatcttcctgtattctcagacattcatatgcctgcgccgctgttaccaatagttcctcttgtgttttcttcatgtttcctcctgtccttcttttttatattggcaagttaattttgtgccctcctttccgacattttaggcaaaaaaataagacactaagaactttcattctaagtgtcttaaaagcagttgaatcctgccaagccttcattgttttagggtattccctgaaatcttaactcccagcaaaagctggaacaaaataagctatctggctctttagaccagacataaatcaaatatcatatcaagaatagcacaatatatagctttagtcaatatatttcagtctatatatagtgttatattgttatatcataaacattgttctgccaaatataaacagggagtatgtggtgcgaaccaactccctgtttgtcatgctatcaacgctcaccatctctgcctgattttaagactcgcgtattgcatcaagcatgatagtatctccttcacagaaatcctcaggttttctgcggattttaatttcatgctttatttcctcggtttccgggagaagttttttacttgctgccttaatcaaagcagcttctttttccagtatttcctcatcagaaagagtcatgtaatccatgggcaattcaatatgtactccgtgatatccatcccccatagagagcagtattctgccagaatttttatttactctgctaaaaagctgttcctccagggtaagatctaccagacgccccatgaatatttctgttggacatatttcccactccgaatatcgtttctgaatttccgctttcaattttccttcatcatatccggggagcagtttaaaccaatccggtccatcataataatcgttggaccacactcctatctttacattatttaagtacaactcaccggaccagacaatgccttccggaccctcagttgatttcagcccccttatggatatgccatttaaacttgccattttagtccatgcctcctaatttgctttgtcctcactgtcaaaaagttgaacaacagaaacctcatacgccaccatctctttttcatgatccggataccgttttatgtatttcctgctctgcattctccccacaatttgaaccggatcgcctaccttcttcctgcttgcagataatgccgttttcccccagcaaatgcaagggacataatccgttttcccatattgccggttaaccgcaacgatcaaatccgttatcttccggttgagcggcgttgtccggtaaacaggcggcttacagataaatccgataaggattacctgattcgtttccgccgtacatggcgggattacttgtaattcctttgagtatacacggagcagcgcgcttttatggccgtctgcctccttcggatatacacggagctgtcccgtgatttgaacatagtttcctgctatatttctcagtgtattacagcatgattctgaaaccctggtaatcacttcatcaatttccccactaagccgtggtaccttcactgatatctcataatatttttttccaaaggcagtatagatgtaagtaaacttatcacctagctcacctgcaacctggataaagttattctctgcttttccttcttttctcatatatccttccatttctattcattgtttttcattcttctctgctgaatcacatagggtttccaataatcatcaatccctttgtaatttccagcccaggtaccgtccgcatctaaatcccagctttttctccgatagcggattgcatgttcctcacacatctggtaaagccggttgcttcctttgcggatttcatttcgctttttttctttatgggggcagatatctcctgctttcaaatgtaaaccgcattttgcacaagctttatcattatgatcacatactatcttcatctgcctgtccatatcataataatcaatcacttccttcaccccatagtctgccagagtggtcaaaacgttatccagtcccttatagttattaacccctggatttccgataaacgtgaggccggaaaattcgtgtgcaatcagggctttcagaacaccgtccgtcacgcataccgtcttatcgcggggatctccaaaaaatgctgccggactgccgctgctggcccccttttcccgtcctgggcttgacagccagatatacttccggccgtcaaggggctgatcaagacgtatttgaaagccgatcagatttctatctacatccggaacagggcagagataccctgaatgctttttataaaaggcgatatcccagtttcctctgtcattcaaatagaaacccggcaccccagataaacttaaatctttctgtaaaagtctcctggcaagcgcctctgttccataaacaggtgtgctgcaaaaccggaaacgttttatggcctcctccgtcaaaccgcgttctttcagcaaaagactgtgtccctgtgataattgcagcagcttgagaagttccgtataaacctggttcctttttacagaatctgccggttccgcctccactgccgctttccgcgttctgctgcctgcatagtttgaagaatatccgccgtgtgccagcctctcacggatttcccgataagcaaccttgaaacagtcctcaccggtaattcccatcagctcacaatataacgtcagcatgtttccttccgcaccgcagccaaaacaatggtaaacgtttttgatacgatttcctctcctgacacaggcattcatttttccgcgctcatccccgcagaacggacagatcagattaaaagaatccttaccgtccgtcagccggactaaatgcagcatatccaccacatcagcgatactaaacggaggaataaaacttccgatttcatcatctccccttattacaaatctcctgtagttaaaatattgtaactatgacgcagcttccagcaaaatttttgcggcctgtctgacagtatcattaggtccccgatacttgtaagccatccattgcagatcctcaatcccttttgtcccatctaacgcaatctctcccagcgtcctgcctctgtttgccacgccaaaattgcatacaatctttttggctgcttcaacggacagttgttccggttcctgcgtgttggcggctgacttgggattctccggctgcctctgcgctctcctagcattttccggcagcttaaccggctggccgttttccggccggatatcgggtgaagccgatggagcattgggttccgggacacggttagcatcttcttccataatcggttcgccgtccccttcctgtccatcatagtccccctgcatatccgggtcatcgccgccctggtcgattgtaaatttattaaagaaataatactttaaactgtaagtgagagcgcttcctttggccttgtccggcttttcattggtaccaatggcatggattataatttcctcaaaatcctgcggatcatcggcattggtccagcgtatctttaaatcctcctcatacagccagtaattcacacccgaaatatagcggacgaacacctgattgccattttcatccgtattggtggcaagttcctccacgatatcaaaattgaccccaacttcattcatggccggagtcaaaaagcggtaaatatcgtctattttgagaaaatcataatcaacattctcattgtacctgcgtttcaccaacgccggtatcgccttgcgtatctctacaaacttttcctgtagtgtcatgcttctcctccttttatcgcactttcttatgacgcctctgaaaaatcaaaactgaattgtccattatcttcttcattaaaagccgctcttatggtttccgctgatactgtcggttcctttatggcttccaccacaaccgattctttttctgcttcatcttcggcctttccttagaatctccaggcattcagataatacattggcgtaaaaaaaacttcattgtctggatgaaatcctggttttactaaactatctccgataatcacacaggccgagcaccctaaaagtgacaattggatatagcacattttagcagccgtagcgtcaatatcctgtgccacaaaaaaaactttcttctgataattgattccatgtgccttagccgagttagcaaatgcaatcagtaaagcgcctgcgccacaggccggatcactcacagatatatagcctttctgctccacttgcgtttcaaaatctccgaccagctgaacctctgccataaattcgcagacatgatacggcgtaaaaaactgtcccttctgatgctggtgcaaattcagggaagtataaagatcgcctaatgccatcgtcacaaaacctaacagctgcgggaaaatttcctgttcctctttctcataagaattgatgatagataaataacactgctctcgctcctccctctcaggagccgacatcacatttgcaaatgcaagagatgacagggtcaaaaaatcattccagatttcccagttggagcgtctgcttgttaagcggtgaaacaacttgataaactctttatcccactgatttttcatgccggtttttcttcccttttaataaaaaaaatgttggaaacattggtctttgcatactcctgatacacctccgggtataaaagtttcaatttctccaactccgatttattaattgctgttgtcgtccgttttgtataacccacacgataaaccgcattccctgcgttcagttcccctccttccgcctgtccaagagctttctgaacagggacataaatttgcttaatctgttcctttaccttcctggcccgcctttccagttccgcacgttccgcatcgagctgcacatattgtctcatcacatcttccagctctgcgggaagcgttactgtctttccggcttccatcttacggtatttttggatcgttgctaaaacaagatccggttcttccaaaaactccggttcctgaccggcctgtacattgttcacccagaaatcccgctccagttcgatcatttcctcctcaagttccaagtcccttttcaaggttcgcataagatatgtatcctcactgtttccgtagaggcacagaaaaatcaccccagcaacattggtgacgctcatatagtgcatcccttgcagcatgtaatggtacggaattgaatcgttcgcccactcctccttattgaatccgaagctcgttttgcattcaacaatccatattttcccatctttttcaacaaaatagtcgatatctccaagcataaatggataaaggggatggcggaacatctttctgaccgcataaggtttcagaccggtctttttcatgaatatctgaaccaccagttcttccagacggtgcccgatttccaggctgacccaattacgttcctccttcacaacaggctgatgtcccaacttctcatgatatagttcattggcagtcacccacggcgacacccggtagacactggcaacatcactgccgccgataccgtgccttctgtattccagccattcctcctccgttatctttgtggtatcttctacgaaaacttccggctcatagtttaaattcagcatgtatttcccctctctcctatttcagttctcccggaatatcataatcactccaacgcaacgttaagcacctggagatagattcctccaaatctgccaattcctttccctggacaccgtttacttcagatagaaagagactggtacaaatagcacagtacacattatagccagtacaggtaccgcccatgtaagtggccttaaactgttctactgtttcagcaatcagcttttttcctattttcacccgctgcatcaatccggaaatcacattgaccggatgattgatgtaaatgtggaacagccgctcaagccctgcaagcgcctcctcatatcttgcaaaggccatggacatattagcatcgaatttcgccatagacgccttcttttcatgcgccagctttaatgccttccctagaaccagcggccgcttctccgctccaaccagcagtgaataatagatattggctccactggccgccacatctgacgaggaaatccggattgctgctgacaactggtcgttcacatcctgccggtaatttttcaaagcctccctgtaaacagataccaattcgtcatcctcaatctcccaggtggcagttgttatggtgtgatcataatatccgcctttaaactttgcgccctcatattttccattgatataggaagaagccgtaccgaatatctccggcatcggcaaaatacaatagtcgttctcatctcctccatgaacagccctcactttgccttcctgaatccggatcagggcgtctcccttcgtcactttcagacaatcatttaaaatcctggccagcttcggcttctctaaatccgacagagcattcccattcaccctcgcccggctctttaatgtagccagactggtttttccaagaggataaacagacctgcccattttcagcagaagccccgtattctggcaggtgtccttaataatgcccttttcctccagacgttcggtaatctgcctgcacagagtttcattttcctccgccggcaatacacgaatggagctgctgggcctaacatcccagccggcccgctcctccaattcctccagaaatccatgcagttcatcctccgaagtaaaattaattgaaaaatcgtcctggtaattcatacgttctcctttctttagttcccttcttccaacatcagtgcggctgtgatatgaccattctcaataatccattcaaagccatatcctgcaatctcaatcagctcatcaagactcaggcagtccgcatttttttctctcctttccttcttcttaaagcacaaaaaaagacccaaaaagatgatcttctcgtctttttgggtctttctaaacgaaccattcctggtccggcttcagcaacagacataagccttaatcatgaagctcccggtttattaccgggacaaaatctttgatatgttttggaaacatataaaatcactatcaactatacattatcacaatatatggtatgtgtcaaatattttcatctatataccgtatgcttattcgcatttttctaattcctccacgcctaaaaaatggtctggataaaaaaatgctcccagattcccgcttcctggccgaaaaaagaaccggtatgacccgccttcatttacttgccagtttttatcaatcagcaatgtttcaaccgttccatcttcctgcagcaccgtcacgcggtaaaactgcccaagacgcagtctgctttttacttttaaaaccacgccttccatggaacaataatttcttttcataataacccggaatataccaaacactttaaatccaactgccagagacaaacatgccgataaagtcaaaaagtcctctgcgccatatttaagtcccgcatataatcctgccaaaaacactataagcaatagcccaatcagaatataaatcttatttttcaaaactcttggagcttcatgccactcatacaaaattggtatggaaaactcttttaccctctctctgattttattcatcagcatacagcctcactcgcagaccattcctggacacattgaatggtcagacgctttttcttatagagctgcaccaccgacagaaggaaatccagcttgattgtctccctcagttcctgatactccggcagcatacggaatgaccattttgcattctcctccagcacacggtacaaatcatccagctgcagagatatatttccagaccttttcagctttccaagcagcagcttttcattctcattcataatcattcctgcgaacgctcctcttactgaaaatccgtgagatattcccatgcagaaggcccggaaacgcagcgacaacggcagccggtttggaatgacaaatacttttagcagcaagtcggccacagctttttccgcacactcgccttccccgcataccagcagcccgcgtctcaaaagacggctgacacaatattgtatctcgctactttttaccgacctttgcagccaagcatcatctccgtgtctcccggcctgtcccatcaggctgagtacataaccgtcaagatcatttctatccacaaagttccacagaagggccgaccagacatatacctccatattcaccagataatactcctcaccggaagcctccaccataaaccttccctttttatccattgttttcttaccaaccgcacttaaaatctgcatagttttcctcctaataataagataaaagcggtacaatcacaggcacagtataaaataacagatagaaaaccgggaacgggaactgctgcggcttcctccattttttgtccgctggaatttttaagggcaagaccggcctaagtttagaaacctgatccctgaaattcaaaaacagagcccagaattcctcacctccgtacccaaaagacttaacctgtatgacgctgtatgcgttcccatctgccgtgatccggctgtctctggctgcttcttttaacatcacgtagaaaacaggacgtcctttcctcttttccgccccaagtccctccacctctctgatatctatttttgcggtctcgtattcctgttcccgaagcggctgacagatggcaagtgtcccttcctccagttccagaaaacaatttgacatatccatcaccgattgatcctgattcctgtaacacgcaaacagcgccgctgccccaatcacagatatcaattctaaataaatcatctgccagcttctgtatcctgccacaacaaaaaccaatagtatcatacccaccgccgcacatatcacagagaaccggcggtacaaatcacgccggtccatccttttatacatctcatcttcatttgcttctaagcgcacgcagttgcctcctctccagcatttctatgccgcttccctcttataacagctgtcccagaacttctcacactctgccacggttcgctcgcaatagtaatccgaaaaatttccaatgtgggcttctcccggctctattcccagcttgaaagccagccagccgtatgcctcgctcctggacatcacgtgatttttccatatcctgtcaaacgccctgtgggccacgattctcttatgccttaaatttccatcagccaggctccctttgggaaccgttgtcccttcgtggacacccacataggcgttgcaccggtccggataattgctgcatacatacagacggctccccggcaggatggtttggctgccatagacatattctgccggccgcagcactgcccggcctccgcagtaagggcagattacgtccggctgccgcttcttgctcctgccattctttttattacacatggatttcattttctgacccctttcatcatattggttatgatttaagtgtaataaaacagacctgcctgtgggaaccgtatttataactaaatttcaaattttcagtgtttcacctttttctttttcatatgatagacacctcctgcgcccagggaagccacagccatgctgccggctccaattaaggccaccggtacctttttcgttttctgtggagtgtaaacggctgtcgccttcacctgatactccgtccgctgattacttaaaaagtccttcgccaggtattctgcctcataacggaaaccagcctcctctgggaacacaacccctccgcgataaaccgcactgcagtcggcaatcatcttgcgcccggtaatcagagcatccctgcaggtgattccctccgaatccacatacgcttcaccggcccactccatctgttggatctcataattctttctattaagctccaataattgcagcaactcatcttcaaaccctgcaagttccggtttttcatcattgtgaggaatcacaacgcttcccaaatggtatcccggcgtcccatattcatgaaatacgacccggacctgaaagctatcttcccatctgcggtctaaaaactcatacctatcaaggagaactttttgttctatctcctgaccggtcctttcatctgtcactgttacaggcgcttcctccggtatggaatctgccgcctccaccccctcataaagcacaatatcctctgcaagctcctcatgagcggggattatcaccatctctctggtgtacccctgcagttcatagataatgccgttcctcataatttcttttgccggaaccagcttttcttccggatcacttaggaaagggtcactataaacagtaatctgttcatcgccggcaggctgtgcagaacgctgtccggtgatttcatgccgcacttccttcaaacggtaagggacaccgtcaatgacgatgtccccgctaaaatcatttctcaagtctttctgatccgtcgtaacatactgttcttcccggtaaacctcgtcggccgcatacgccttctgactgctccctgccagtaaaaacacaacaagcagcgccatacagcccgttttcatcagacggcggcgtctccaggccagcagcaatacagtcgctgcaactaaaagcaaagctgccgctgccgtcccgccccgggaatcttccgctccgtaacctgtctttggcaaatcctccagtcctttcaaaacaacgttcccctttcctcccagttttgacttgtactccgctgtgattgtcccgtaatgcctgctgtttttcagcacacagtcgcccacgacactgccatcctcaaatacctggaacgtgaatactgccggatttaactcataagtctcaggaggagtgatttccctgtactgatagattcccggtttatccgggataaaggaaagtttcccttcgccgtcagtggttccttccagcaccacgtttccaccgtcattcagtatctgtatcaccgctcccggcagtccgcctcctgtttccgcatctaccttttgtatcaccacaggaatcttcttataatcctttacggtattgtctcctgtaattctcccgtcgtcctccacagtaaactggaatactgtcgtattcacatagtaattgtccggtcctgcggtttccttaaatgtatagacaccaggcttcggcttcttaaagcgaacattcccgttctggtctgaaacaccgctaaagtatatgcttccatccggattgtagattgtgatggtggcgccggcaatcttatctccggttgttgcatcgaccttagaaatattaccgtactcatcatgcggtttgtcaccacccccgccaggtttgtccggcgtatgggtaatcttatagttgtagaccgagaatgcctgcacgcccgcctgatctttaacctcgatagtcacaggctccatcttcttgtatcctgccggggcctccacctcccggatgatataacggccaaagggcaggcctttaaaagcttcaggttcttctttcgaaatccattcccggacaacctggccgtccatctcgcgcaccagctgcagcttcgccccggctaccggcttgtggtcctttccgttttccttgctgatttctacctgaatcttctggttttcaatcactacctcctggatgcccgcctggtttgtcacctggaaccttactggctttatggctgcatatccttccggactggtcttttcgcggatttcatattctccttttataagcccggtaaacattttaacgttcccatctgtcagccattcttccaccagccgttccgaagctgtgccgggattggaaaagagctgaagatatgcaccttccacaggttctcttgtctctgaatccactttcttcacatggacttcaatctgcttatttttcatctcaaaatactgtttttccagtccggccttcacctcaattgtaacgggcggagcctgctgataccctggcaatggttccagttcacggatttcatacattccgggggccagtcccttaaagatttccgataattccccagatacccagtcccgtattacctgctgattctccagccttaccagctgcagcctggtacccggaagcggcttctctccatcggttttctgaatctccacctctaacttcttatttgagacttcaaagctctgttttccagcctcattggtaacctcgatgatgaccggctcctgtaaaggcaggtatccgtctgcaggctgtttttcctttacggtgtagaatcccttttcaagtccggtaaaatgctctggctcttttcccgatgtccactctctgatcaatttgtcatcgcggtttctgaacaactgtaacacagcgccctcaaccggctcttttgtttcttcgtccgtctttccaatgtccaccccaatcttattgttctcaaccgtaaacacctggattttataatcctttgtcacggtaatctcaactggagctttcaaaagctggtatccgcttgcttcctccacctcataaattaagtattctcccgccggaagcccggagaaccgctccgccgccccatcggtaatccattcacggatgacagcgtgattctctttcctcacaagcctcagcttcactcctgctaccggctcatgactctccccatctactttttcaatttctgcctgtatggggaagttttggaaggtaaatctctgcacaccttcctggtctgtgattaaaatttccatcggcggcatatgaagatacgcctccggggattctacctcacggattagataccgtcccgcaggtattcccttaaaggtctccggtatatcccgagaagtccattgccggataacttcctcctccggcagacgcaccagttctaatttcgctccttcaagcggctgtccattttctccgtcaaccttctctatttccacctcgatctgttggttctcaatgcggaaggtttgcactccagccgtatctgtaaccatgattttgaccggttcctttaacagctgatagcctggtatggttttggcttccctcacaaaataggtcccggcccgcaagccggtaaatgtcattgcctcactgccggttgtccagcgctttatcacattctgctcatcgtccaacagttccagtgataccccggccatcggttccccggtctccttatccaccttctcaatccatacctcgattggataatttctgactgtatacgtctggagttctgctgtcggcagcaccacaatttccaccggctccatcctctggtatccctccgggacctccacttccctgatcacataggttccggcaggaagggctgtaaaatgctccggttctttaccggtcatccactctctcaccacatttccgctctctttctcagtgagctgtaatttagctcccggcaggaaatgctccgtatcctggtccagcttttcaatatccacggtgatgtgttcatcaaacatttccacatattccggaacggtcatatttttcctgatttcaaaatacaccttttcagcctggagaaatccgtcaggaacctccttctcaatcagcacataatatccggccggtatgttcttaatcacatgcggaactgttgtggatctccagctctcaaaaatctctccttcatcttttatctcattgccatcggcgtctgtcttcacgctgacatgacggatttccagcaaagctcccggaacctcgtccttcgagactaaatcctttttggatatctccacagaattagcttcatttgctaccgtatactggtaactgatctgttctacccggtctgttttgatattgaactggaacgtgtggacagcaggatcaataaaatatccgtccggcgcgctcacttcctgaattttgaatgtgtaaaggctcacagagccgtctgcgctcacagctccaatgggcatataaccacttgccacatacccgtttttgtctgtaatcagaatcgttgccgtatttgtatccaggtttgtcagcttaaaagccgcacctcccagcggcttgtccggattatccgcatcagacttataaatctccacccgcccttcgattcttttatcaaccatttcgatttcaattacttctctgctttctgccgactcaaaccggatttcctctgaccggacatagccaaacggcggctgcttttctacaagataatagattcctttgggcagcgcctccatcttatgaggttttaagtccccaaccgcatacccgtcaggtatccgcccatctttcctctcctgttccgtataaactccgtcagaaccggatatccaggtttccacaagatcattctcctcatagtcgatggaagggataagattcccgtccctgtcatacaggaaatttccgtccgtatctgtgatgaaaagctgattcccgtcctgatcgtaacggttgtgctttgtaaggcttccgtcctctgccgcccggtagacagccagctccgctcctgctatgaccttgcctcccggctcatttgttttggcaagcagtacggtaatcggttcgttcaccatagaaaagctttgtgtcctgatacctgagccgacgtctaaaacaggaatgtacagcggggccgccgacttcatccctgacgggacgccttcctccaccagtacatatttccccaccggcatatagtcaaaatgcatcgcccctgtctctgtgacatagcacacagcctggacacttcccggaaccagcttactatcatagtagtagccaatatagctgtgtcctccctctgtgataaccggatgggccgtcttgcggacctcgcttccgtcatcggttgtccatctgtagaacagctcctccggattgtagcggatatttcccgcctcatcatattccggttccccctgttcgttgagcactgccttgtaaagtgccagcacagccggattttcgttatccaatgctttcccggttctggaatctgttttgaggatttcaacagaggtatggtcgtcctccatgacagccccctgtacctccccggtttccagaatgatgacctccacatcgctggaagtcacatagccggcctctgtcggtgttttcgtctcccgcagaatataatcgccaggtgcaatatggtcaatccagtgcggtttcgttgtcctgactggttttccatctaccccgtatttcaaatttcctcggtcatcgtattcgtaaccggatatccactccttctggattctgggatttccctctaagtccctggtaatctccaggtgccagcctttgtccgaatcatcatagactttatgggccacatagagcgtcagttccgctccttccacttcttctctcgaagtcatatccagcttggatatctcaattttcgtaaagtcattctccaggaagaatacctgcgtttctgtcgtctcatttaccatcaatcccaccggcatggactgaacatagcccttggaagaaggcactaccgtttcctccagtatgtaagctcccaccggcaccctggcaatctcatgggcctttttatctgaggatgtcacccactcgttatccgccatagtgactccgccgtctttgtaatagataggaaggccgttttcatcctcaaccggctctaatcctgaattgatggtctcctttccattttcatccctgtgtacctccacagacctggatatgatcttattgccgttcttatcaaggggccagacaatcacgttccccttctcgtcctccacataggccatgcctgtctcagagtccagcatacaaatccggtttccccagtcgtcaagcccatacagagtcccgctctcctcatcatattccgttggatcgtactctaaatcaaaataccagagtggtacggccggattcttttcctctgtaatatcccagatatcgttcttttgggaatccgctccggtaatcctgatatcggtgtcatagcctgtctcacttgccgtaattccaaggacagagtcaaacatattcctctttaccgtgacacctttgtattcatgatcccctgttttctctactttgagcccctggtacatggtaagcgttgcatttccaacataggtgttatattttattccttttccggaaaatgtaccgtcctcatggtaaagaagcctgacatcctccatctgctttaattccgcttctgtccctgataccgtaatagaggaccactcatcaaacgtctttgtggcatagccatatcctgcatattccccgttcggccagtaatagaggagcacgtcccctctctttttaagctgttcttcctccccgcggaccatataggtaatagtatcggaaccactctcgaccttgtggatttccacatggataggctgatccttcacaaacatctggtgcaggtcctccaccaccggttttccatcattcccgattaccttcacatactggtacttaacggccggtattttcttatccggctccccatcgtcataatactctaccgaatcggagtatacctcgattgcaatcggtcttgagcggacatagccctccggtggattctgctccaccaggacatagcagccggctccaagcatctggggcagctcgatatagccaactccctgcttctcattctgaatgctgccgtcctcctgctccacttccccgtcacggacggtactatatgctttgaatatcccgacctctgctcctgtctcatcgcgcatgatgatttgttccgtttcatcatacagcggcgctccatcttcatcaaacaggacatccccggttccgcctaccccagtcgtgccgtttccgctcacgtcccgctttgcggcataaattttaaacagcgccccgtcatgcaggatattttcccctgtttcactgtccagcttttctatgcggattcgtgatccataaaattcattttcaaaatccatattggcaaagtcgacaaaattaaaagagccgtccttttccagtcccggctccctgtttccaatatctccattgtcattgatgatttccccatatctggggtctaacacactccatggtacaagagccggagcatacttccggtctatggccgtggaaacaccggacatcgtgtccaccccgtccagtgtgactccgtaatctgtcacagttccattccggtccagatacgtctcataatatacctggtcctgctgcccgtggtcctcactgatactcttgtagtggtaatacccggccaccgtctcattcccacagtccctggcgctgttcggctccagtccgtatttaaacaccaggaaatccccgtcatgattatgcgccttgattgtatgcgtttcttcattgaagcggatcagataccggctcatcagttcctccggcgtcatctgggcgtcatagaaatactccggtgacggatttttgtcatgaacggtaccgtcttcgacgatttccgggacaaacggcagttccacttcctttggtttgtcaatctgataatgtttattgggaatctctgtcggctgctgctctactaaaacatacacgccgtaaggcagcatgatactctgcccccagtaatcgtcctttccgcctcccctgctagcatgcagcgttgtaaggtcatggtccacatcatagcgcgggtcatcccactctacggcaagactttcccccagctctggatgggctgcaaaaaaggcttcgtaagcatagcttccgtcctccatggtttcaagaagtcctgtctgtattaagtcgctccgcagatataatttaaaatagaaacccggaaccgtcctcgcctccggccggttgttataacctccaaagagtacggtaaacggatctctgtggattttgtaggtgttcgtattctgataggattcctccgcaatgtcttttgttaccctgacggcctgttttatgactctctggtttacaatgaccggcttctcccttgtccccgcgtcctgatccacccggtactggccgggatacaaaagaactgcctcttttatataagagccttccggaaccgcatccttttttgtgaacacggtgacagagccgttttcatgctggcggatataatcgccgtaatccatcgaagccccatccaccgtgatggtctgttccggagcctgcgcccggtacgttactgacagtgaggtgccttgagtctcccagtccacatccgtggtatcaacatgtatcgtataaagacccgaagccctgtcgtactctgcggcaatctcctccaggttttcctcatatttgaatacgggaaccgtctcatagacaggcaccgtctccatttccggaacaggatttccttccccatccagaatcgtctcgcctggttcataggtatcggcagcctgtgcatatacatattccaccaccaatggttctccctgcttcaccggctcctgtaccgtttttctgccaaccgtaaaccggtaaccgttcctagcaaattcttctggtccgtaaatggcataaaaatagcccgagtcgtaagtgccttttacgatcaggcggtctgtctccctgtcataaattgccgcgtcactcagggctttatatccataacgcaggattgccttccaaactccatcttcctcgtaaatccggtccacccggtaagcatcccagaaagaatctgacgcgcagtattccagaatttccccgattacctgctcatttgtctcaccgtccagctcaaggattgcccagggatactgatccaagctgtctttataacctgaatatgccagggcctcattgacctgctttttcacatacgccttatcaatgtcctccgacgattctttgtccggatctccctcatcctcccgctcaatcgccgccacgccggcatttaagcggttcacagcagaataggtgaatttcatagggtccgactcatagaccggctctcccgcttcatcgtattttaattttacagttccgtcctcattatacttgtattctcctccggctgcggtcttataaacgatattgccatttgcatcccgcctctcaacccgttctgttcctgttatgaccagttccttatcttctgtctcctctcccgtcacccggtagaatttggaatcctccggataccctgacacctggatatcgtatccgtctgtgccgtaataggtaacagtaaaatcattccagcttccatcatattcattgatccgatggctcaaatccgtagttttgacagagccggactttgaaatggcaaaaggcgtaccggtacggttggattctgacagattaattccgaccctggaaagctcatatccctcacttcttgaaatttcttctatataatagtttcccaaaagaagtgggcggccaatccactggttcccgttattcgtgatattctcctcgtatcggttgggagcctgtctgctggtttcggattcctctgtaatcgcaacaaaagaagcatccccattctcatccgtggctgccacagctaccagttcccctgccaaaaacacggttccggtataaccgtccgggtggacaatatcatcataggcatataatccatagacagccccctgcagagtaccatctccctgcgtctttccatagctgctctctgggtcctgccggtagagttccaaatccctcttattgatatggatttgtccctctgtacggtggtcatacacttcaaaggtatatcccgtatcggaatgggagtagtcgttctgcctgattggcagaacctcactgtcatacatcacgccgtcccaggtccagttcccgccttctccttcatcatcctccccatacgtcccgcctcgcaatagttccagctttaagcggctgacagcattactcggcgttgcttcctcaatgctgttttcataatcctcctctaagtcgtcctccagttcctcatcgaaaacctcatcttcgtccagtatctcctcatctttagtttcttcctcctgctcctctttctgaggtttctctgcattggaaggagtggccgctgcctgtaccactggaacctcatgcacagagatgcccggacctaccttttcttcctggatttccgatggagtggcctgacgcctggctggcgccaaagaaggcagttcttctttttcctccgctttattccccggatatgttccaatcacattacctctgccgcctgcttctgatgaagaaaatatcacgatttccactggaatgtcatcattatggaggtcatgaagaatatatccaaatctggctttaatctccctggccgtatagatacgttccagattgatccatgtgtcccaggcttcatcccggtcctcctccaaatatccacgggcaaccccctcgtctaaggaatgaaagtcgcagttctcctcgcaccagtcaacacactgctgccaggcctcccaggcttcccgttccagttcttcatttttggcgtcaatttcatcctgctcatcttcatctgcgtcgccgtctgcctcataataatcaataatcggctccgggtgtccattacagtacgtcttgtaatagtcatatgttttcaaatccgtatgctccaaatgcccctgccggtccgtggtaatgcggtccgcacatacggaaagggaatcaaatcctccctctgaagaaggcttctcctcccagaactggtcctcctccagattggttccgtcaagctgcccaaaatcaaattgctccagaatctcaaaatcagagttttccaaaggctttcctgtttcagagtcatacttggtcagctcaattttataattccgtttaaaggtttcttcatgctcatgaagctcatagggaatctcataccggccggatgtaataatggtatccccctccccaaactgcagccagacttcccatggttcctctttgccggccatggtaatcatggcctgttttccttccgtggcactggcttccgtccagccatcgggataccagattttaaatgtattcggcttaatccagtattgtgcagccgtggagccctctttaaaatgtcctttcaccaggccgatattgggatttccatcggaacaggtaaaggttatctgattacctgaaatcttatagctccaggtaagcggcagatcgtactccagctccagctgacgccagtcactgctgtcaatctcgaaggtagcgctgtaggtcccatcctcattttcctgcatcttatgcttcggtgcattgctctggtactttgaagtgaaggaagggattgacccctcctccaccgctccattcgtctgattaaaaaactgggtcagagcacccctggtctgggccgccacggatgggtctttgatgttggcaatcaccacttccatctggttccggaaatcttcaagcccgttccagtttccgctcataatggcccaggtagccgcctgtcccaggatataatgcccctgtcctactttcccggcccgttcctgatacccttcaaaattcccggacgacgaaagcgcataccacaaaatttctgcggtttcacgagtcagaccaagcggcaggttatctccgtctgtatccagatcgtaggtctgaaacgttccctgtgtactttttctcatggatttatttggttccagacaatacccgggtgcgttacctcctgaatcactggcattggtgattccgtatggccacagcccgacacggttatgctcctttccataaaacgggaagctggctccatcctttaaaagattttgtgttccataataagtgtaggtctcccctcgtccgcctccgtccgcccaagaggtgaaggagccgaactccacggatataaccggcagcaatgaaagcactaccgcaagcaggaatgctgtcagtctcctgcacttaattgaatatcctatattcaaaagcgtgttcctcctttatttaggcacaaaaaaacacatccgacatggttctgcctggatgtgttctttcattcatattatattgtttgcggtaccgaataacttattgaaagccaggattatcatactcaataccacagatgggacaggtccatgccgattccctggcgccgaaaacataactggtaccacagattgggcaggaaaaacctttccggtccaggtagaacgaggaacttgttccaatcgtggaggaatcaattcctctccactccccatcaatgcagaccgaattccagacatgggaagcattctcactgatgccgcaccgcagccctgccgcattgctcaacagcttgtacgtcctggcaaatcccacacattccgattttcccagaaccagcaccccgtaaatggtgtctgaatccggtttgaattcccctgtgtcataggcagcccgctcctggatatattcatatacacgttccgctttttccctgtcgctcagcccgtaattaaagcccgacagaaactctgctgttttctgatatacggccgcctctttttcgttgaggccgctcaccggataaacgccccttagagccgccaacacacggatatctgacatcccccatctgccaagctcctccgcataatctgtctctgcatcataaattaactcaagggaattttcgtccagaaaataactgtgatcatcgtatggagttgtaaatcctctctcatcaataaccgattccggccccagccaggccccgtcgcttcccaccttaaatccatctggcgtgattgcatcccgtagcatggccccggtcactcccatgaaataatctttgccgttgtccttgatccacccgtttttcatatatccgttggagatataataccaatttcccttatcctccagccagccgtctccctggtagcttccgtcatctctcacatatctccagccgctgtcatcgcctgcccattttcctgcaaacgcagaaactgccgtcatggatgataaaatcagtgacaatacagtaatacgaatccatttcttcttcattttatccacctccagcccaaaatttgactcgtttatccactatctcactttcatcataccaaactgcgttttcctgtgtccactgcttcagaaaaaaacatgacttttacaagaaaaaaacaagatttgagtttcttacggggtacactccctggcatataaaattgtcctggcattatcgaattcatagctgcaggtcacaaaggaccaaagcctggcgatgccagattccctgtcttccttatacaatccgccttccagcatcgttttaacgtactcctgaaacgctgccatatctgaaaaacttgtcattctcctcactcctgccccttctgtacaaacaacggctatgggacgtaagcggatttctttttccggggtatagatgattatgttttgatgctgtctgaaataggactcctctttatagtttacgagatcatgaagcattatcccatttttcatattatgtccgtagataatattatgcaggccagaaaaatcttctttgcactcgtaatctaaaaaaacagctccggcaggattctcctcctcctcgtatcccacggtcagatacttccagttgtccgcagactgcatgatcggttcattgatgttcgtcccttctataaaaagccagccgactatttccggattacgttccatgagctgctcaaatggaactggcggatgataatcactatccacctcccccaattcctctttttccgccattttcgccttggcaaaggtaacagggctgtccggattggaattcacggtttgttctcccttcattaaaaacaccagaaaaaacaagatacccactccgaaaagcaggtatcttgcatgcattttattcatttggctccatatgttttaaaaattcctccggtgtgaccggctgcggcccgccgccctcataatcctttatattcctggtaacgatatagcgggcatggttatgcactgcaacccggttctggacacaatcctcaaaatccttccagccgctgtccagcgcctccctgatgtcttctcccgtcacatctgccacatcaatcaggctcaggattgttttaatactatccacggtcctcacgcggtctttcatctggcggtttaaaatgtagtagatatccgtgacagccgaggcagataaaaagcctctgatgattcccttcccggacatctgcagtacccgtcctgacaattcatatcccggacgctgcatcaacacatccagcactacattcgtatcaatcaatacctgcatatttttcatgcctctcattccggtaatcttctaaagacatcccctcatcctggataattcctgtaatgttcttcagggcggcctccacatcgacttctcttttctgtcttcttttatctgcaagtggcaacacaatcacctccacatccatattctccattgactttggcactgtgaacagtgtcttcagcctgtcgctgtttatgatttctctcaatacttccatggattgcacctcctttgctgtatctcaacaggtatcttctaattataattatatcctaaacccgttttcaatacaacaaaaattacggacagcaagggacttaaggcaaccatacgccgtcagcccccactgtgtaaccgtccggtgtcgtccggttcacaaaaagagctcccctcgttccgtctgataccggattgaaataataccattttccttccaccagataccagcctgtaaccatgtgtccctgggtgccgtcgctgacattgtggaggaagtagcggttttggtccttgtctgtaaaccagcctgtctgcatatacccggcttcatcaaaatgataccattccagctttccattatagccaagctgcacccaggtatccttcgggtagcttccatctgtatacttaaaccaccagccgttctgatcctggatccaggttccagcaggccccgtctccgtaactgtattcggtctgacggagctggaggaacctccaccaccgcctccgccgccggaagaaccggaactggaataagtccggtctgttgttttatagcggagaattaccttgcagcttttttcaatcccgccgtcctcggccgtcaccgtaacggctgcctcggcgctgccggccacaccgtttaagtcctgtatccactttgcctcatgattggcagtgaccatgccatcttcaacgcttatcatattttggtcactgacgctccatgtgtagtttctgttatgggcggcttccggcagcacagacgcactcagctgctgcggcgatgtaatgttccaggtgagggtcggattgctcctcctgccctctttcaccagctcaatgtcaaataccagttcctccttacttaactgcacttcctccggatggacaatggtaagatcggtggtagtaaatgtgatgtccgcttcgcaggtatccttgtactgtccgtcctctgtagtgacaaccacaaatcccttcttagaccccgaagcattgcaaagtgcatacttactttctttcagccgcgcttcatcatttgccatcaaagtctgtatccatgctgcatcctggtttacctccacacttccgccctgatccacggtcagcacggagccgtcattggtctcccatgtaatcttcttattatccgactggtccggcacaattactgcattcagtttctgcaccggcgtcacctcataccggacagaaggatttaaccggttgccttccatgattttctctatagaaaatgtcagattctttttgtcaagctgtaccccttccacatggacgaccgtatggtcctcggttgtaaaatcaatgtttacggcacagaccgcctgttttccgccatctacggtagttgccgttatgtaggtggaccggtttccgctggcgatggacgcatcatatggattcagcttcagattttcattgtccacattgatcaaatctgcaatccatctggcttggttattcacgcttacaagcccgtccctgtccacggtcaccatatctccatccccagctttccaggtcactgctttgttatctgcgtactcgggagtgattgtctcatataacctttgggacggtgttacccgataagccacctccggctgcagccggttcccgctcaggacacggacaacatcaaagctgatttccgactggttcagcgtaatattggacaccggcacagttgtctcgtctgtaattttgaaatccacagtgaccagacagctggcccgcttctgtcctgcttctgttgtcacggttacggaggcgtaattcttaccctctgtcgtaatcggtttggacggatacagctcctggttggtcacgccggccttgattaaatcccgtatccactttgcatcctggtttacggtcacagcacctttgtcgtccacagaaatcacatcggttgaggaaccatcggtatccttcacattccagaccacatttttattggcggccgaatccggaataacggtggcagtcagatgctgcggatctgtaatcttccaggcaatttgaggattccagcgggacccgcttctgatttgttccacttcaaagttcagcttgtcgcggtcaagtaccactccgtttgtcatagcccggtatttagctgagactgtgatattctcatccggcatggtaaaggaaatatcggttgtgtcggtgttgatttcttcatgatgtccgccatcgtccgacacccaggctaatgatccgggctccagctcataatacacaggcggattgctctccgtattgttgaccgggctggtgtagaccagcactttggttcccgctgcaaccgcccccggattcgcccagttaatttccttcacatagttattctgggattccatgacggataatgttccatagtcaaccgaaggtaccgtcactaaatatccccggatggggtctccggtcttgctggccgcgatatgatggatattgctgtccccgattgccaaaaccccttcctctaattcctcataaaagaagcggcttgtctgttttacaaagctgcccatctgatacagcgaaaaatcccggttattggaatagtacgccccgatatgatgttccagcctgatctgcggagtcagcttgtttccaaatggattcaatgcaaacttatcctccgaattggcaaacaggtattccagatgatctcccagctcgatatttccgccctcaataaatccgataaacagacccgctgtctttaaagcagatgaggtggaagccccgatggttcctgcaaaccggccgttcttcacccgtccgctctgcatgcgcccaacaagcccgccgatataatctgccgatgtgcttcccacttttccctccacatagcagttataaacctcactgtcatagatatttccacaaataccgccaacgcagccctcagagtaaagggagctgtaactgtcattggtgtcgctgacacaatcaccaataaaagtggagtgtgcagagccgcagattcccccggcatacgcctccaggctgccggaaatatcggttccgcctaacacacttccgatatttttacaatccgaaatcatgctgtcataagcctctccgacaataccgccgaggacgccggctgcccggacctgccctagagaaaagcacttttcaatcaccgtgtcattcgcttcccccacaatcagggccgctttattcgccgcatttacctgtccgtccacagtcaggttccgaatggacgcgccgtatgtatatccaaacagtcccgcatagttctggctcgtatcactgattttcaggttatagacacggtaaccatttccctctatgtttcccttaaatggatatggttctgaatctgtcagacttctgtaataaccaatcggcagccaggaagcactgtcatttaaggagatgtccttcgtgagttcaaaatagcatcccttgtagccatcaacttcctcatttgccacctgataggccagaagttttaaatctttatcattccgaagcagatatggggactccacggtaccctctccatcaaaatgatccgacatttctatgccgccccacaaatccccggccatcagcagcgcattggaaggtgtggcttccacaatttcctccagttcaggagcttgttccttctccggtaccgcttctgaaggtgtcgctgctattctttcttccggcatttcctccctgtctttttcctcctccgcttcgggaatatccgcctctgaacgatcctgctccagttcttcctcctctttttccgaatctgtatccgtttctgaagcggtatccgtaacttcggaattctccttgacttcggtatccgctgtttcaggattcgttctgagctcggtgtccgtcaactcaggattttccccgatctgttcctctgtaacatcataggttctcccagcctctgagctgcttgccgcctttatttcctgatccgtgcgttcggcaatggctgcatacgaaggaaatgcggcccctgcaggcgaaatccccataatggcaatcaacgtccaggcagtcaagacagccgaacctttctttattctcttatccatgttttcctcctcaatttcttattctgattgattcgcaacaaatgccggcctaaatccaatgctctgactgcttacctcccccgccgaaacacggccgtcccaggatatctgatacacccggttcccgcctgtcaccggcgttctcagccagtagcccatcgtataggtacccgcatttatataattgttagaatcggacccgttcagcttccataagctgtctttgtaccgcgctgcctcctccagtgacagacagaacagtttgtccatcgaatttccctgccgcacagcagactttgtaaaacgtttcaggacaatctcataagcggatgatgcgcctaaataagaataccgtaccgttgttgccgtgtccgcaatattttctgtgttttccagattacggtttaaccactccctgagtccggagccggtccagtcattgcttcctgaatcaaaaacagcctggtctcctccaataatctgatcacacagaaacagagccccccgctttttggcagcatccatgtaatccgggtcaatgcagcggaatgtatagatttttcctgcaatggtccgttcctggacatcccccgtataccagagccgctcctgcgtcacattctcccccggcttttttaagacataggccgggcggattcccgcctccatcgtatcagtctgttctgctgcaatatggccgttatactgaaccacataggcatggcgattctctaccatggtcctggtccaataaaatcggttccccgtattcggactccaggtctgcaaggtatagggcttgtatggttcgctccggatctctgcaagggaaaggcaaaatacacggtcattgatactgtcattcccttcggccagcctgatggggataatctgttctgccacagacagcccatccgcaaactgcagattcagccagtttctgatttccgaggtatcataactctccccatttccaaaaccggaacataaagaatagggtatgactcggtccgctaaaaataactgtccgcccttataatcctcatctatacaggtaaacgtcatttctccccactcgttcggaaggccggttttgaccgtctgcttttcccctctttgaaacagctccaaaagtgcaccgcaacggtcgcataaaaaatcgccgtcctggtcgctatgtcccagcataggaaggataacttcctccctgtaatccgtgcacagccggcatgtcacaatcctgcttccgcttaacagacatgttggctctactacttcttccattaattcatggacatgttcttccgctgcggaaacgccagcatcggaaggcgttgccatctcactgccaaacgaaggaaatgtagacataagaaaaaaggcggccataatccccgccgccctgatcgttttccgcctcataagatagccctgcctattcttccaaggatacatttcttgcaatgctgcgatggctctcgtcttcatccgcttcaaaggttacactctgccccgccttcagcttccgaaaaccatccatctggatttcagaaaaatggacgtaatagtcaatcccgtcctcgtccgtgataaagccgaatcccctctttgcatcaaaccatttcgtagtaccttttaatacttctggcatattttattctccttttccggtgctccttcgcacctatgttttgatatgaaaaaagcaggctttttcccgcccgctgcctgacgccggttaccggccatatcccattacatgcatcttttaatgactcgggtgataattccctcagccacctgtgtttcatcattaatcctggtgacaacaaagccaacctcatccttgcgtcccggcagactggccgtattgcaggaatgggctaccgcgttaacgccattattcagatggatgaaataagtccccttatagacatccgtaatctttccaacatatttcccctgcctgcgaaggcgcataagattttccctatttgtatcaggctgcgcctccttggcgctcacctccacccgcatattcttaggtgattccgctgtcatttttaaaacctttaccagaactatatctccgttggcaaatttatcattggcgtccaccatccactcccaggccatatcccttgctttcagggaacactccacgccgaaaacctccagacggaccgctttgggagccaccgcgattaccctggcctccacaatcctgcccggacgcaccatagggtgtccatctgtgccttctgtaaaataaaaaagctggcgttttcttaacatggcctcttttctcgacgcaacaatactccgtgtcttctgatccatatctctcactataaaatcaatctctgcgcccagcatattgttggcaagccttgtctgacggttgaccgtatccgcattttccctgccgtctccctccaggttaatcatcatctcctccatagggataatgacccggtaccccttatactgaataacagccacaacccagccgctctccagtttttcaattccgccaagcatacccgataaaatctttctggtacgaaacgcattcgtcagttcatgccagtttacatcctcctgttcgtgcaggggcctgggctgtccatccgtatcaaccgtcagtatccccatagcacctgcctgcagcgcttctatcgctgtctctttcgatgttctcacctcttcctcttttagatttgccactctcaaaccatcctttcctcaattatttatagaatcagaggttttccctctgctctaaacaccggaacgcaaaaaaagcagcctcaaaatgagaagctacttcctgcatgtaagtatataaatttcatgatatcattatagaatagacagaatcctatgtcaataagcctggcgacgcaatatagtcgcaataccgtctcattttctctattgggaagtttcccattttaatctgctaaaataaacgaattttccatccagccaacggcagatccggttctccaccaggtattcctcactgcagcattccggattatccttgtcccaaccggtaaacatcaaaaattcttccactccctcatagggaaccaaggcctgtgccgtgcgcagtaccgccgctctgtccgtgtaatcaatatccacgtcaaattcctttttcattactgtcgagaaccctagccggataaccggactttcatatatcatccatccccgcatggacccctcctctcctgattagtgaacttttgttgaacccgaagattacaacaatcctctttgttaggattcaaatgctccttccaatatacatagtgttctgtgacatcctcacaaacggttctctctggtatatgaattttatcaataattctgattttttccgataatggcagatggcgataattgccacgtgtgagagtataactgctgaaatccacatgtttcaaccactgctttatccatggattgattctcaaaaactcgataatgcacttttcaattcccaatgaattcagcttttcaaaatccatgaatgtttcaatgatagggcttaatcggatggatacgtcgaatcccgccctctgtaattgcaaaatggcccatacccttttagatggcgggctggatttttcatacagcaatgccttggcatcatctaaacaggttaccgtgatttgaatatgggaaagttccctgtctaatatatccatatattccggttctgcaataagcgccgatttcgttacaataagatatcccactctgcatctattcatctcaagtattgtctggtaagtaaccctatgctttcgttcacatggctgaaagcaatccgtcataccgcccagacggaggattgtacctggctgaattctattaatttttctctttaccttttcaatatctgcaaccctgggatttgctgcatcccacaacccccgaaagcttaacagtgagcgggcatagcaataatcgcagttgtgttggcagccgcagccataggtatccagccgtgtattgtatttacacttgtctccctcatttccctgtacattcttataaaaacttttaaattcgcttgtaaatacctccttcattaaaaatattgttgtctccttccgtatccctataaaatcacatttgcatcacctcgtttccttattgcggggagcagtaccgccctgctgtcatctggtaaagcatccagatatgttctttacaccaccccgcgtcaatcatgatacaactgtaatgtgagaacaataaaagacgtcccctgttcggacgccttctatcgttaacctaaattttacttactctttgactattgaaataaatcttccacccgctctatccgcttatgatcatcctgaacatgtggattctcctgcctctcctctttatccttcccttgtttgcactgttttcccgaacggatcaacgtatcaatagacagaggctcttcttccttctcataacaagaagaagtctgatcgcctgtctgctcatcccccacattctctgtatttgcttcttttattcccttctctttccgccactccggcatatgtgcatctgtcttttccggcctcagcagctttgcctccgggtgcctggtatagtcaatttttttcacccttaatatcttttgccccctgataatcaacagagcctggtcaagaggaaaccgcagcacctcatctggaagcagcagcatccgtttccccaccgaggcagattccgaatagtccggaacatagtccgtcatcctcatggtctggtaacttttgcagatggataatacccccaccgtaacttcacctgagcggttactaaaataagtagccgttgtcatatcattgcagcctagaaataatgaggtgtcacatcctcctaaaatttcctcccactgcccgtcaggataacggttttgaagctgcgggatattttggtacagaatgcacattccaatcagcctgcttctggctgtcgccagttttttcttaaaatctggaaccactcctaatggcaataggtaaatctctgctgcgcgctcggatttttcccctgccccacaccgtactggattgtttccaatcatacggcgttccaccagcgaacatgtctctggcttgtgcctatccctccgccacttattatcatggtttcacaggtactgtggcactactttcacaactgtaaatgtacttatatggcagacgccactttcgatacaaccgcgtgagatacatctgcaggcattctgcgcgtcagctgcttactacgttccgtacagcttagtatcgccggcacttaggccgtaccttttcccctgccggtatgatcctcgcatggtactgcaggacccctgtatcctgtaaatacagaaggcttttcatccgaaccatcttactttgcctcaccggcatacccatttgggtatttccacatttctgtggattctgtttagagtctttcattcggtactttgtcaggcattgccattctagccatatgccggcaccgtccgcgctgtcacacacagtccatgcctccatgaacctttccttttttctcattagggcgtgcttcacacgtcttcaccgggcttataaccccggattacctgcataatccggcgctatccgaagattaacgaatccccttccgggcgttaccccgtcatttgagatttcagctgtacagttcctgtccatcaggctgcggctctgtcagtatccctgtttttaaccgcagaacgcatcgcactgttcggaaattcgtccagaataaagtataccggaaccggcagtttacggtcctgctgctggtccgcaaaccgcaccagcttaatacacaaaaaagaaacaaacaacgtggccagaacatcgtatgtggagtcctgatcggatgtaatgcagaaataggcacattttttttgtcctggcagcgtcaaatcaatatccttgtggcttgtgatctcctgcaccagcttattctgcatgatttggagcctggttcccagtcccagaatggcatttcccttcaccttttcagccttagaaaaaagccggtacggtcccttggccgggtgcgtttctgaaagcccgtcaaaaatagcgtccagcgcttccagactctggtttatcagcagcttatacgcctccgggaaggttctgtccccgtcattgtactcccggtagacatacagacagagcgctttcagtaaatccatctctgtgttatcatagaaatggtcaaatttatcggttgtattcctgattaccacatcaacaaaaatatcaatcagcccgccgtcatcaatttctgccaggcaatcccacgcgtctgaattttcaaggttaattaaattccattgtttcacaatatagccatgttcctttagatagacgaccatatcctcgtagagctcggatttaggatctgtcacgaacatgctttccccgcgtttcacacactggaaaatcatattccttgagattgccctggacttcatgcttccctgtgagccgcacacggcaaagttcctgttgagcatggaatcttttggcaggctgataatctggtcatcatgaatatcctgccccaaaaggattccgtccacctcctttatgtctctgtcaacggccagtacctttgtccgctccgcttttgtcatatagcctgccgttccatatgttcctttcctggaatattcaaaattacgctcctcatccatctgattttctgcagcatttccccgatagataatgactcctccaatcaacaggaagataaacagggaaaaaaccgtattctttagccctgtcacggtgaaaataccataatacaggcagacgaatggctgaaaccgaagggagcctgcatctttgaatatctgcgtgaacaagcctcccacataaaaagccagtacaaaaaaagacaggccaaacagaatccgcttccctgttttcctgtctatctgttttattttatcccacattggctgtctgctcacctacctttccttcacggtttgcagcatgatattgaaccaggttcccataataattgcccagggtattgaccgcattatacagacttgtgatgattactgcccggatattatgggctttcttgtcattctgtcccagggagcttaacacatactgtatgtggaacagattcagtttaccaagttgcgcctttacctgttccgctttccggttctccttattgacccggacggtctctgcctccgttgtcaggacatcgactgcaatccgcaccatttcatccagacggtcatcgtccgggtaatcatgctttaatatttcatactcaatctgattcttaaaccgcacttcagcctcctgatatgataagatgggataatctttgttgtagtctactgaagtaatctctgtatttgtcccactgttttcagctggaggtcctcctctttctggtggtaccctcccacttatttcagtgacacctcccacaaataccggtgggatacccctctcattctggtgagataccgcacagacgccaggggtatcacttatttgagtgggatatcccccggacttttcctctgccatttcttcacctgctgcttcctctgccgggtatgtcaatgcaagaagtatatccacgtccaaatcgaggaacaggacattcggcacctgctgcccgttaatacacagtgtccgaaatacccgcttaatcacccccagtttttccagttccacaatagcattgttggcatccctcttggaaataccaaactgatccgccagctgctggtagcttctctgcaataaatctgaatggaagcgtttccgaaagcctatgagctgtccgctcccttcatccctgatctctgccgcccggtaccagtatacaatatcagagaggattacgattgcgtttaaatatggttttccggttgatttgcgtatggtcttataccaggccgctggtatgatattacctgtgatgttgattcggctcatccggtccacggttttattaccggttgtgaaatcactgtccataatagcctccttcctacttaattttgtgttctaaggcaaaacagctacttattcctaccgtctatcttacacataatagggcaaaaaaagagcggttaaaattatctccgctctcacttacttctctataaatacttccactcttgggataaagaaaattgatacgccatatcatatgctgctattgctgctctatttacatctacaatttctccgaaatccctgtcctgtccctttatacctttttcacgtaaaccagataacagctgttctgctgtttctaacaataataaatgtgcatctctggtctccctataagtttcacgaacactcatttgacactgtttcctcaaacaaaaaagataatgtctaaaagcctctttttccccaaatccagttgatgacggtaaacccaatccaaataacatttcactatatggattttccatactcgctgcaggttttaaccgatctaataaatccatacgtttggctatatccaaaaaaggaattttaaactccgataatgcatgtggacaataataccatactgctctcctactaatatttttctcttctacagtttcaaaatgttccggttgaaaccaacgtaaattcaaaaagtttccagaggcaatcgcatcacatttagctagagataaacaaagcaattggtgactcgcatatcctactattgtcttcttgcgctgtctcttaattccagcaattaaggataataaatttgacacccataaaggtttatctactaaataatatctttcaggatgctcacagacaatgtagacaccctcaacatcccattcttctacataagatattatcctttctatctgatcttcatcattcataacatcaccagacagagaaattgtatgtatcctattaaagtcagcgccatatttcttagcacaatctattgccattctttgtatccggtcccataaatcatctattttggtcgcagtaaatgctggtaaaattaatgattctgaatccacttcacgatttaattcaattagtttttgtatggtattatccagtcctccattttcaagcattgtaaattggtcttgaggccaatatgcatattttgcaagatttttttgaaacttacgtggatagtataattgaggatcaactaaaattttcccattacctttatgcactttattggcaaatccaccaatactcttaggtataatattcataggactgataataattgttccactaccaaaatcttctaaatgttcttctgctagcgattgcataccatgtcccatttgtataaataattccacaacacagccccccttaatagataaatgttgattttgccgctactaaccagcctatcgcttgttctgctgttcttggtctacgtgaaggatattttcccatcatcgcacccaataaagccataaactggctttgtgagtctcctttaattgaatattgtacaggcgtgattgtttcagttctttgtaacacatccaatacattaaccgcattttcccgaaatggatttttacccgttatacattcatatgtaaccacacctaatgaaaaaatatctgcacgtgaatctatatccctctttaaattattaaactgttcaggagctgcgtaaccaggagtatgtggtcccattaacgcttctgttttggttagtgacggaccattaataattctagctataccaaaatcaagaaagtatatcttaccatctgttgttctgataatattctctggcttaatatctctatgaacaattccctttttttctatattatgaataaataaaagtccttgttctaaaaaatctactgcttcttctaaagagaattttaatccctgatttaaaagttcacgtaattctgtaccacatattttttcttccacaatatataaagtttcagtatcatcatatatcactgtacctgtttcatacagtttaggaaccgcatctaaattcaaacttcgtcctatttcaatttctctcagcgatcgcggatcatttaacgaaaagtataattttataacacagtcaccgtaatctttatgtgaagcatcaaaaaccagcttttgtccccctctagccaatactgatactctcttatactcttgggtcatttcatcaaaccgtttcatttctatattacctttcctttagcattcatatgcaatcgattttccaatccattcattaaactgtaaagatagataactggacggcaaggctagtttttgtgcttcgaccacctttcgaaaaccattacctttgcaatacaaaccaacaccttgtctttgaaaattattaagagtcccctcctgaggcttttcaatatttgttaaagcatatgactgcgaagcaaaccaagtattaatcaacgattgctctgcaacttttttcatatcatttatttttgcctctacagtaactaactttttaatactgtatattttttttaatttttccactttccactttccatttactcgcataatcatttttgcatctattaaacattcaattgattttaatatttgcttttcaggtaatttcaaggtattaattaattgttctcctgtacagccctttgatagatataaatgcgacaatactttcaaatcaaatatatctagtttttctctttccttagaccaattttccattatatctggcgaataagtcgcaaacactatatcagggaaaccggagctaactcttggttcaataaaaactgctaaattatataccttgttatctttcaaaaacttactacaataatactcaataaattcctttactaattcaatttcttcaccttgtgttgctgtccgagtaaacaaacctatattgggtatattgtgttcaaaaatctctatccgttccatacaacacctcgtgttattctaatttcttccttcattttattatagcaacattaaaaacttttgtatatatcgttaaaatatttttctaaaatataattttatcacttgaatatttagcattttcaagctgtgtacagcataaaatactaaatggattcaactgctattcaatgttttctatatcatatacctttccaaatactggatagccctatctcttataattccttttattactatttcagtcccaaaatagttccgaataacttcttcctgataatcgaagcaatagataactcctttcccttctctttctattttccctcggactctctttaacctccaaagctccagattatagcaaaagtacacgggattcccgcttgaatccacaccatcgcctagggctccgtctgtttcagttatcttccacaatgcagtacacaaaaatttccgcaatcttctgtcttccaccggattcatcaatagccgtacctgtatctctgcctctttcacaaacggaataaaataaattgcctcataaatatcgtcaagcataaacagattccctttgagtcccccatcgctttccaaaagccttttaagcatatccatccggttcccaaacatcaccgctccggctggcacacggtatccttttccccggaaaactgcctccatacggcttcgcattgttctctctgttttctttgcccatttcatcaggctctccatggtattgtatacaatcagtggcatacctggagacaaaagcactccgcaggctctggagccaccaatttcttttgccatgccgcccttaaactccaaagtaccataatatccccccatatcggtccaaaccgtctcctgtccgtcctctgacggagggagatggaaggcaggggagaaaaagtccggtttatcgctttgataaattgaaacgccggcgacagacagataaacccacaccatgctcatccggtgcagcctcagccgtttatccggttcgcttttaatatggtttgtctctacagaaccactgaggaaagtggtgaaattatccggatacagctccagcagctttctttttgcctttgctttaagcacatacccttttaacccgtctttacagcggagactaatataaccgttttgctttaaccgcgtaatcaaagcggcactataggaacacgatccaacggcatatgccgcccaatctgccggcagctcgccgctcactccaatcagcatcagcaaacgaacagccttactctcctgctccatattcaccacctcacttacctgcctttttattccgtataatactaaaaccataccctgctgactccatcccagggtagattttcatatcattttcacctcccgttccctgatatccagcatattttctccaaaccgtaccctatcgaaaatccggcaaaaaatgctgctttattttcgatacctgtcacccggggcaaacaggcttatcctgcatattctcccacagccatccagggaatttttcattctccatgatgaccagataggtgcggtcctcctcccctaatgacgtagtatgatagctgttcagataaagtccattatctgtctttaaaaagaacgttcccaccacatccaggatatgtttttcctccagattgtcatgatcccgtacccgtgaaagcggcagatctgcattatatacatgcagaaaacagaccgtgcagcactcatactgcggaacctccttggcactgtcctcccgtttcatacaccagtgttttaaagccatgtacagcggtttatagatataatccgtataatcacttttcctgtgaggcaccagaaacggaagcgaaatcgtcataatcccttcctgatatgccacttctattccgtgaatccctattaaatcctctttatacgcttcgtatttcctcgtatcaaaagtcacttccagcaccagccggcgcattttttctgtcagccgttccgactgtctggccgcctctaaaatcagatcattgaaattctcatattggctgttaatatactgctttgtgcgggccgacaaaagtgttctggcctccgctactgacaaatccagctttcccgccgtcttctgcacatcatccagctgctgtcccatcttggagaaggcgtcacccttctcatgattttgtgtaatattcgatttcaccatctcctttcactaaacaatatccgattgccggtaaatccagcttctcaattacctccaggcctggcactgcaacaatatgattgcccgtccccctgcattttctctggaatacactgttcaccagctttacatcattcaagccgacatacagaatatcaaacaaatcatcttcactgataaaaataatgcggaccggatattcctcctggtccgccagaaaatgctctataatggttctctttttcatcaggctgattaacacccagaatgccagcagcgtcccctcgtctctggctgcataagaattttcattcagatataccatctgagtaaccgggctgctcccgatgcggttatctttttccagacgtttaaacgcccttcccaccgcacgctcctgtccaaaatacgcatatacctgtgatttaaaaagtacattgtatttctttattaactcaaaaacttccctttcctgcaaagtaccttccaccatcctgccctcctgttatatactggcccattacgtcataatgacgcacaaaaaaacaatgacgttttcatgacgcaataatcctgaaacagagcacttttattatgcttatgcgtattatttacgccatctatactcaatcaaaccgttttcccaacgccccctttccataacgttccagcctctgacgcagttcctttaaatccttccggtccgtagtgattaaatccttctccagctggcttgcccgaaactcaaccgtcaggttattgttattcgttgcaatcatgccgtttccacgctcaaaccgcacaatagacatcatctccgcctccgacagatgcagaacctctttaatctgctccgcctcattgttttccatatttaaaataatttttgtctttgcattgttaatgatgcccctgccatatttcccgtctttcaacgcaaagaaatccgtcagatcctgagtcgcacatacgccggagccgccgtatcccctgattatcttgaaaatttccagtacatattccgctgccatctcattggacgccgccccaatcagtttccatacctcatcaataaagatggccttctcaaccgtccggtcctcctttgctttagaccagacaaagtcaagggccacgaacatgccgacagtcagaaggtcccctgaaagctccgagatatccaaaaccacatatttgttggataaatccacattggtctgctgattgaagctggaagcggagccatgcaccatacggtttaaaatattggccagccgctttgtctccgctttctccatcagcacctcgtatacgtctccaagaataggcatggttttatagcaccccggcttctccggatcaaccaggctctggttttcatgggtaatcccttttctgttataggtgataatcaaagcctcatccaaaagctgcttctcctcgtgactcatatccgggatcagcagagaaaaaaagatatgcaggtcctggattttggaggcaagttccgaatgctggatcatcggcccatctaaaatatcactggccgccttatccgttttccgaatctccatcacattgatacagttggaggaagccggtgaaatctggataaaggaacctccgatattctcacaggcccgcgcaaattcatgtcccttatccggtgcgacaataaatacctgtattcccttccgcctcatacgcaatgccataagctgaagggtgaaggtctttcctgcgccggtggtacccatgatagccatattggcatttttgtatatctctgaattaaaaatgtccacaatcaccagagagctgtttgctttgttgactcccatcaggattccgtccctgtctgacatttcatagcttgtaaatggataacagctcgccacaccgctggtcagcagattccgcttcgatctctgatacagatttttatccagatttagcaacggcagggcagactgaaacgtactttcttccttaaacaggcatgacatggtatcaatatcctgggaattcaggagctttttcatctcctttgcccgccactcaacctcgtccgcactataacccgtcacagttatcaagatactcatatagtatagatcctcactgctgcccaacccatttttaagataataccccgcctggatggactctgccaagtcatcgtaatcgctgttggtatcagacacctccttaatttttgaactgttcaggcggattctgcgtccaatccgctccacacttttggctttatcctgtttattcagaaaaacatcaatatcaatcccctcaccggcatttaccaaaagtgacagccagccggccggaacacggctccggtatcctgcggaaggtatatacaggtaggtgtggtaaacaccgtccatcacaacgtaattcccatgcttgaaatcaatggattccggggctatgaattccgttatcggtatacgttccacactctcctccccattttcccggatataccagctgacaacctcattcatatgctgtcccagggtcttaaacgtactggtcctccggttcaggatgtggtaaagaacctctacacatgcctgtgtgtcatgttccgggatcaggacttcgttgccgcattgagataaatacttcttggcggtctgtaccgcagtatttaataccgcaacaatatcattttcactctgattgcgggtgctcctgtaagtctcatattcaaatatcaggaaaaaccggcgggatattgcctcgcgggagccaacggaccgaatcagagacgcataatcctcctgcaacaggcggcagcgttcatccggttcattttctatgtccctgcggatattctcaagaaaacctgttatatccgccttttttgacagcaccttgatttgcagctttacaggcgcaatttttaagtaacccacaaaggaatagataatattccgctgttccaccggactcctgagcagaaaattgacaggcagcacttccacaatcttgacatgcctgccatcacttgtatggataatcccatcagtgatacctgtgatcggaatacagcctgacgcaagcgtcctcgggattggcccgacatcaaccggcccttcaggacggaacgatttactgcttcgtttctctttcccagccctcttttcttcctcccggcgctcaccgccgccgtgtgttctttttcttctctcgcttcgatatactttttttatttctcttagctggcatatcatctgatcctggttcttctctggcttgtttttctccagcctgattctctccgccatcccctttcttctgcctcctctccttgcgttctctgtccctggcaagtttctgcagcctcctgttccgctccatcctgtaccctgcatcgggcggcttcagtattctcctctgcctgacataccgaaggaaactgattaaaaacgctgtcagactctctccttgtatccccattaaggaaataatcgtaaccggcagaataactgccacgccaatataaatcttggtctttaacgtcgtatccagcatcgtcagcggttttaacataaaaaataccaggattgccgtctcaaccgcattcctggtccgtaaccttcctgacaatacagtaccttcctccacaaaattgggaggaataaaatacatatcaattcgttccttttgctctgacaccttaccaaacctcctctttcctctgttccatcatctgtcgccagcccaaaaacggtaaataccataggctaatacaaaaatcccaacaaccagacaaacctccggccagtgcgatggctgcgcctcatattcctcaccgtcatttctttcatcagaagcactgacagctggttcttcctggtcagtctttgccagttcctgatttaatcgttcctaggacgcctgattttctccgccatctccttccgacagaacggaaacctcaaacagaccggttttatcccgacttatctcctggctttctccattaaaactgactttataatgatttttattccagacagcctcagcctctttcatctggtactgcccttctggcaccggcagattataacaatatccgttttccacattcaggttgcatattttttctccatgagtatccacattttctaccacgacacggacatatccggaaaaatgccggattacctcgccgcggattgccaatatccctgtcgtctgctctgtatccgtgaaaaattcatcatagtcatccgtatccaggatacgttctgcttttacaaggacatttccattatcaaatctcacatagcagccgctctccggatcaaatgcccagccgctgtaaatcattctgccatcttccacaaaaccatgcccctcctgccacgttacaataaccggaatgttctgattgtctatctcattctgtcctccatggacaggttccgataataggagcggcagcaacaggacagggagtatcttaattttccagcatttcattcaaacagaacctcctctaattcccaataatccagaatgcgccgtcggacagatcccttccatatgatttgatggtatcaacactgtagactttcccggttctgctccggcttcccggatcggctattgtgatatatccctgcctgtctatccccgtaagcacgatataatgaccgctgctacccgatatggtattaggcgcacagattaccaccaccagctttccctgctttaatgactgaaccaccttcgacatcttgtcttttccaacacgctccaaagtcagtccccaatggcgggccacgtttgcgggaaaagaatggctggttccctgcccaggtacatattccccatgttcaatcgcataatctgccatagttttaggcgatacggtctcccctgtcaaagtggaaaccacgattgccagtgccgttggaccacatcctgcgcttccaatcgtactgcttccgaacttcatgcctttccatggttcctctccctgattataataaacaacctccttcacacatcctgcaaccgtctcataagcgattgtatctcccgcagtatcaatgtctcccataatcccgtcatcggaagcgccgacacctgtcacaaaatccttccaactgaacatttgaaacaaaatatccttcattgacctcgtcccatcctgtatcgcctgcaacagctttacaaccaggctgaatagagagcggttcgttatataccggtattcatatcctgtgctggtttccgtaagttcccggttcagcttcagtaaaatcgaatactgtgcaatctctatggtagtctccgttttttcctccccctctccttctgaaatggtcacctccctaattcttgtcaggttccagcaaaaaaacgtatccagttcagaggctatcgttgttttcatcatgttgagagaaacggcatcagagggattcgatacaatgcctccctccggtatctcaccgccatctcctaataaagccatgacattggccacataggcaggcgtttccccattctgggggatttggtatcctgcatcccgcaccgctttgccccctgcattataagccgctattgcaagctccaggccatttgaatatgctgcaaaggctctaatctgagaagctatgtattttgccccacccatgatattctgttccgggtcataaggatcagtcactcccagctcccttgcggtagacggcatcagctgcataattccaatcgctcccgccgatgaaaccgcattcggatcaaaacctgattccacctttgccatggcctttaaaagagataccgaaacatcataggtcgcagctcccagttcaaaatattcatcatattcgctggtcaaatccgtagaaaaagagtccaaacctccatatccgccaaaactcctgatctgggcaccggtccacttttcctcaaaaataacagacaggtatctgctcagttccggaaccagcacggtttcatattcgtccctgataatctcatattcatcacatcccgaacgatcaaaatctgcttctatctccagcaggatggcatcacgtttttcttcaatcatagacaatatttcattctttgcctctggctgtgacaatactgcttcaatacgtgtctgtagattcagccgctctgcctgccttgcctgacttacataatcatcagggctgcttaaaccgatataggataataccagggtcagcatgttcgcaacaatatacataaaaagaactaccataacaagcaaggccccgatgaatttccagaaggtcttactggtaactactgctgcgatcactgctcccagcggcccgcctgcggcagctcccacagtcgctcctgcagaagcgccgccgctttgggctgcgccaatagccgcccgggctgcctgaacggaatgggccgtctggtatgcctgattgactgctttggctgcctgagctgccttttctgccgcctgatcaggaaaatcagaatccaatccgtctcctccgatatctatcacctccccttattcttcttagagccggattttcctttcgctgtctggcttcccgattgattttccttctttgctggcgctttctgcttctttttggggaccgcaggcaaaacttctttatacgtcttttcataatgaactttaccgtccttctgcatcgtcgtcttgataccggactgaactggttccatcttaacttcatagaacttccttccatctgcctccacaacctggtgtggagaatccggtctctcataaacgtcagctgcaaatctggcatatttcattccatcccgctcaagccgctgatagttctgattgtctggtacaggcgtaccaaaattctggctagctgcttccggtacccggctggaaattgttcctggctcctggctgccctccatggctgtcatcacatttccggctcctgcagaaccggctacacctgttggagctgccatgctgctttccgcttctgccatcacacctgtctgacctgaaactgacgtatttccagatattcctgtattcatacccgtttcctggccggatattcctgaccccccgccgatatcctgactggatattcccgcacttacacctgcctcttgtccggaaattcctgcactcacgcttgcctcctgtccaggtattcctgcacttacgcctgcctcctgtccagatattccttgtatctcagcaccctgtaaaataccggtatctccgcttccatctgccgcagaagaactgtttggaatataatcgcctgtaaaatcacttacttccgctccctgataaccagaatcaaaggaaacagctgcattttcatcatcaaaggctgctccggcatccatcatgctcatgccgtctgtcattgcgctatcgccaattccaccgtagtctgtcattgagccagcgtcaccaagctgtgccataccgtcttcctctccaaatggtcctgtctctattggattttcagaaagattgattgctccttcgccactggcattcggcgtcatgccctgctcctcatccatacctgaattgatggtgctatactccatatctcctgagaatggtccttccatgtactcctctcctggcggtattccgaatcccatattgtcatcagcttctcctgccctcataaaatcattgtcatttgaagctgctaaatcatcctgataggatggaacattcacatctgcaccaaaggcattgtccgatccgttggaatcctccggcatattgcggaaaggctcctgaacgttttctcctttatatcccgaagcaggcacccccatatatgcaccatttccagccattgctgaccgatccgctccccaggaacttttaccccaggagctgctgcctcccggactccccattggaataggacttcccatgccggaagccatcttcccggctcctgcagccgggctgcccttgtctcctgccggtgagccatggcctcctgcatttcctccaaaatgagagaatacgcgccctaacatcatcattacaccaagtccacccatgcctgggcttgtccgtcccaaattgactcccagagaggccatataagaatccagtttaaatgcaattttaccaaatcctaccagacagagtgtagcagcaaaaaactttgtaaatccataagaactcgccatcatatttccatatccgctcaaataaaccttcagacaccaggcatccaatataataagaaccacctgtccgccaaacatcttagaccaggaagccagtatattgttcgtagcctttgagcctccggtcgcaaatgcaagcggggccgtataggaaaacacccctaaaagcacatatcgttccgccatgataaacagcaatttcaggtagttccaggcaaccataaactgaataattaccatcagaatctggatatttagactatcaatccccagccctgcagtgactgcttcagctgcggaagtaaaatcagcaaatgaaacaaccgtaatatgtgttccggtaacccagtcatacggagttcccgcaacttccagaacataattcacgatacttttagcgccggtcaccataaaaaggcagatacagctccggattacaagttccattggatcttccgaattcaggtacttaccaaacatcccctttaaaagctgccagataaaaatgagcagtaaaatagcaatcgccaatggaacgattgcctctctgtacaaatcctttaccacactgaacagttcctcaaaaagatccagattacaggacagcagttctgtaaaaacctgattgacaatctccatcatgtcaacaataaactgcgaacactgctctctgactgcatcaatcagcatttgtatcagccagcccataggattttacggtatcttattttcattattggtttttctttcaaatacccctcctttctgccggggaagcaccggcaaattttgtttcggatttacttaaccattaaattcactctttggaataatcttctccatataggttacaatagccccaagtgtcatcagaaccgcccagcatactacaattcttttcagccatgcccgtgattcatccacggtttttccagatttggagaaattcatcaaaaacaggcacaccgctgaacacacaactgccgcaaccgtggcaattcccgccacatccttgtaaacattctgcattgcgctcttggcaatatcaaaaatatcatctgccgacacaggcatgatcagacaggccatacaggttatgaccatgaatacaaaaaaagcaatctgcggaatcattataaccatacggttatttctgacctgctgcagctccacaaccattccagttgcttccacctctgctttttccttcatatttcttaaatatgattgtatttttccagaatgcaactttcttcacctccattttgatttccgggcaaataaaaaagcaaccattccgaaaaatgattgcctgtaccctcagatttaattgtttcagatttatggcttcccatcatgtcctcatgcatgaaacctgactttatcattataattcttttgaaattgtgtgtcaataatattcctgacgcaatattgtctcaaatcagtctcaaatgttctcatctgaaaaaaggccaaaaatcacgtataaaaacacaagacaccagataatttatcatatccgatgtcctgacaccttatatttaaactggaagttgtctaactgaaatcacggcttgtaaaggttgtatccatgcactcgatgataagccggtccatgcggtgttattccagcccaatctctatcactttttactttatcaaacaatcttaataaattctgaaagtcaattctcacagcgtcatcgtactgcgggttacagaacttctgacgtataatttccctttctgtatcccattctttatctgtcaatttttttatccactctaggctatatttagaaggctctttatttgctaaacctttgtatatcccatagcctactaccgctaaactgcctaatccacatatgaatttatacgctttacccataagaaacccctccgtaaattccgattcattaacttctgatttactatattatacaatatttcaaatcaaaagtatagaaatagatgaggccggaaatcacgtccccggccctctcttaaattgtttattctcctcctcttcaacttgccttttttgccattgtcattgcaacagggaaataatcaattctgtaacacaagttagctgtctcaaaacatacgtgatcaagagcaatttccacgatccgcttaaccttggacgtttttatgcgtctaccattataaaaataatatgctggcttgcccacctggagcggaaattccaatatcccggaaatcagtatatttcgtttctcacatagattcgataccatttgactcatacgatacctccttatacttagctgtttcttccactgcctaaatcagctttcattctgatgctattctgatattaatttcattctccctttttaatgaccatgcttcttcttgttttacattgctaaagtctatatcccccatgtatacagtcatacatgaaccatactccagtattgcctcctttccctatctcgcctggtttatgcagccagagttatatttccaatcattccatttctgataagacgcaaaaaagacacctaaacgcacaggcatttaagtgtccttcttttcgtcccaaaacaggggcattattatacaatagccattttctttgctcctggcccaggccagaacaaaaataatatacattcttcagaagaatattaaatcaatatcgcctttagattaccacaacatatagtatcagttaatatatgtatacgatatattgtttgcaatccatatttacttcgtaaatttattaatgcagcgaatcatggtatgtatctgctcataatagagatcctcatcaaattttccgcaaatcatggaataattgatcagcaatggccgatacatatcaatcagtttcatcagtgcttccttatcccccatcttggccagttccaacaaaccttcaaattcaaccattttgaatctcccttcgcaattttttcagcgtattgtagtaagtatcaaccgtcttcttctctggcatgtggaggcgattagcgatttctgcaaaactcagtccattcatgatacgccagaaaatcaatttcctcctttcatcgtcaagcctcatcagagcattcagcaatctttcattttcaatcagattaagaatctgctcaatatcactgctgtctccgtacagcctgctgaccttttcctctaaatagtcaaaataatcgtccttatgggattccaactcgaagtttgcagattcctcgatgggcatctcattctcctgaattttgatatgccgttttatgtattttatttttgtatttttgactgccgtctttaaatacgcactaaaggaatcctgcgtagaaaattctttatctctgcctttcattttcattcctccatttttatttgttatctgaaaatggaggggacaggcggtgaacgacaatgcagtaatctattccaaaccacaaaatacgacaattttcgtaaaaaaattgccgccggatatataatccaacggctgcctgtctcattatgaattaatacttcatgtatttttagcaataatagttcatgtattgtcgcaaaagtgcgcgataaggtttcctctctttttttaacagagccagactgttacaggacttatgtatttttcttttccatatccccatactccccctatatctgcagccataaaaacacgccaaaatccacggataggctgctttttttttattagcacctattcatgatcttggcgtcttaatatgaactaatattgcttaaaaacatgagggtaatagctcgttttcatttattcacattaaagatagtattaaacaatgtgaactattacacattatcggaggtgaactatggaaagatttcttactcaacttggttccatcatcaaacatgcaagaattgaagaagggctgacacaggcaaaattggctgaaaaggcaggtataagtacccgctatttatcggatattgaaaacaagaatgaaatccccagtctcaaagttttcatatcattaatcctggccttgcggctccctttagacccaatcctgtatccaggtacggaagccacagatgaacttcttcggcttttttcacaatgcgacgataaacagattgccgtcattactgccatgacagagaccatgattgatataaacttctgatatgtgtattatatcaaaatagttcttccaaaatctgacttttttcatgcttttttcatgtttttcacacaaaatccggacaaatgatgactccatcaaatgtccggattcttaatcatatatacaaagcaggagccgactcaggctatcccttttataacctcctcctcaatacgcttgtaatctgcattgggattatagaaaccttcctcttttgcctctggttcatcaaattcctcagcctcgtccggtccccacaaatccttctgtaaaatatatccgcaggaagggcaaaaattacttccctctggaattatggactcgcagaccggacagctcctctccggcctataataaaggaacatttttgaaatcgctttgatctgtaatataatctggacaaagagcataaggattgccagacttttcttccccttccataaccagattcctgccatggccggcagccaaatcaaactaaatatcccaaagtgcatggcttcttcatatataatatcaatatttctcttattcatcgctaacctccattctatgtttctaacgctttactactcccactacttcagctattgaaacagcgcctattattctggaatctctcgaatgatttcgattgtcccccataacatatatacttttgtctggtacagtaaggaaaacatcttccatcgcatatggttcttttatatatttttcttctaatattaccccattgacccaaattgcttctccgtctgtctgtacagtgtccccttcgactgctatcactctcttaacaatgcgtctgccaatcgccttagagtcaattaccacaatatctccccgctgtggcgttttccctatttttacgaatatgatatccccctgcgtatatgtaggttccattgaatctccattcaccacagccagccggtaatagctgctaatccaaagggccgccaaaacagacagccctatattcaaaattattgcaaactttcctctcactcttgtccgcatcttgctcactttctccgaaacctgttattggtatttttaagaagctctatttcttcctgatccatctcatatccatcatctatttcttcaaacagattttctccggcctctttctgcaaattcccgtatgccccttcctcctggggaccttgcggctgtccagcccctgctagctctatattttctccattgtacgccaaaactgctctcgctacatatctggcaatctttctcccctgggaattcaggatttgggccgctctctggtgcctgtcatcgtcaggatcgaatcggatcgtaaaccgatactcgtctttttttcccatagcttcctcccagactatactgcatgatcggccagatacagctttttatatccttttgcattggctaatggatcatgaatgatgtggtactcccctctataacgaatccacacctcttgaatcacctttgacaagagcatagaccctccccctacaaaaatcgttgttattgagttgaaatcaataccaagttcccggaaaatccccaatgtattgactacatactcataaacaacattcttaatcaagtcttttatctcggctgccaaatggcaatccgttctgttgattgccaaatcaatatcggaatcttccaggagaatatcctgctgcttcctcaccctgttttttatttcgttatacagaggtataattcctttttccaatgaatcaaaaatctctgtatccggttccccgtaacggagcagcagataatctaatgtaaatccccctatatcaatgataaatgccttaggcagctgccgcagcttcatgtctttagaatacatgaccgccgccgcgtatgcctggatataggatacaacctcccggtagcggaccaaataatctctggtaccatagcggaaagatatagggctttccgtccgaagaaaatagccctcaaatttttcatacaatccagaaaaatcagccggcggaagtcctacaagaagttccacgccaaccggacggttcggtatcggacggtaaagtccacggttcagcttgtcctccagttccatcgccactcccataagagtcagaatataataccgttcgtcaaaagtcttgtccttcatatacgcaatccgtctattagatggcgtatagaacttcccgttatattccaaaacctttgtatccagtttgggcggcatgatatccatttcattcagtccggactgaaatacaaaatgttccgttttaatctgcttgtttcctgtatccactgatataaccatataagatctcctctctataattcaactgttttccataacgtatataatacgtccagctacaattctactttaataaattcaccccatctaagtgaaccgtattttaaaaaaatttatttttcttctgcccatgtctcctggaagtgctgcaggagttcccggctctcatcttcatagccccacaagataccccgtaaggccttcagcgcctcgttacgccatctgaaataggttgcccggttaattctcggtatcttaggaaaatgcggctccaggttgtctaaaatctctgacacattctccggtttatacgctgacaaataagtataataaatgacccagtaaaatttctctccctggggatgataccgccgcatcagttccaccgactcgtcaatcagccgcaggaacttattggagctgttaattgcctccacccgcccccggatatttgccgcatcatcattcagatcaaggccagcttcgtatatctgatttaagaactcatccacatccgaaccatattccgcctggaaccttcttttcacctgtcctattttgacctgcatacgccagttgacggagcgatagatttttagcagggtgatgatgtcgtgatatgcttcgttgtccttacctgtatctcgctttgtaataattcctgatttacccattacttccctcctagaataaattgaaactaagggggcaaaattgaagacaaaaaaaggactggctccgtgtttgaataatctctattcaaacacagtccaatcctttattttaagaggtttttagtgtaatctgataataaaatttttacgccaattcatttttcgttttacgccaattttacgccaatttggccggaaaatacaaaaacttataagaagttataagaaataaaaaaatgccctaaacccgcataaatactacattcttacggtttttagggcattttgttttcactccgaacaattacttcgcgtaatccgtaactcttgactcacgaattacatttaccttaatctgtcccggatattccagttcgtcctcaatccgtttggaaacatctcttgccagcaatatcatatcgtcatcgctgatctgttccggaactaccatgatacgaacctcgcggcctgcctgaatggcaaaagacttgtccactcccttaaaggaattggttatatcttctaattgtttcaatctgtttgtatatgtctccagagtctcacgccttgcaccaggtcttgcagcagatatggtatcggctgcctgtacaatgcaggaaatgaggctggtaggttcaacatcgccatgatgggattccaccgcattcagcacagtggcagattccttatacttcttacacaggtctgcacctagctggacatgggtaccttccatgtcatggtcaacggatttaccaatgtcatgtaataaaccggcacgtttggctaaacgtacatccactccaagttctgacgccaaaagtcctgacagctgggccacctcgatagaatgctttaatgcattctggccatagctggtcctgaacttcattttaccaagtaacttaactaattccggatgaattccgtggatgccaacttcaagacaggctgcctcgccctcttccctcatgttgttctccacttccttctgtgccttctctaccatctcctcgattctggccggatgaatacgtccgtccacaatcaaacgctccaatgctattctagcaacttctctacgtattggatcaaatccagacaatactactgcttccggggtatcgtcgataatcagttccacaccggtaagagtctcaagggtacgaatattacgtccctctcgtccgatgatgcggcctttcatctcgtcgttaggaagctgtacaacagaaaccgttgtctcagccacatggtctgcagcgcaccgctgaatagcagtcaccactaaatccctggcctttttgtcagcttcttcctttgccttgttttcaagttccttaattaatttagctgtgtcatgttttacatcttcttcaacagattttaaaagatattcttttgcctgttcggaggttagaccggatatccgctccagttcctgtatcccctgctcatactgggcttccacttctgcagtacgtttactgagaatgttttcccttctgaccaggtccgcctccttcttttcaagggcatctgcctttttttcaacgttttcttccttgcttaatacacgtttttcataacgttgaagttccgctcttctttccttggtttccttctctaactcatttttcgtctttaaagattcttccttggcttccaggagagcttctcgcttctttgtctctgcggtttttaatgcttcatctattatttcccttgatttttcttctgcacttcctaccttgctgtcatactgcttcctctcgtaattgcgtgcagcaaaccaagtaataatagccacaactatcataacgataatcattatggggaccattatctgtgacacaggagcacctccttatttaattttcattgtacgaactacaacatattaattttatacttttttcagaattatgtcaagtatcttccccttattttcccgcagagacagacaatatagacaaattacaacagggcctaatcctggttttcagcggttttaatctctctcaataccctgtttatcacttcaaaagagtatcctttcctccctaaaaaggccgccagacggcctttttcctggtaggaggcttccttttttcccttaagccgcctggtcagagcctgcctggctgattcctcctcgtccacaggcgactggtccagcgcttcctctatataagacgaatccacgcccttttgctgcatctcatataccatctggcgtcggctctttttccctgcataggagcgcacatagctctgggcataagcgttatcatccagaaaacggtattccttcagaaaatttacagcatactccactgcctctctgggatatcctgccttcccaagtttttccttcatccacttctctgtttttcctgaatcctttaataaatgaagggcatactccttggaccttggccgcagtacatccctgaggatttcctcatacacctcatcttccagctccctgccttcctctatcctgtaccgttccacctcacccctgtataaaacaaaggcaaagccttcctccaggaagactttgctctttctcttatctacagggatgacagctgtgaccatcataccagttcaggggcatccgcatcagtttcccctgttttagtttccgcctgtttagcggctgtcttaaaggcctcggctgcctccatggcttcctctgctccgggcagttcatactttgcccttaccttggcctccacctcggcgcagacagccgggttatcagacaggtactgcttggaattctcacgtccctggccaatcttggaaccgttataggcaaaccaggcgccgctcttctcaatgatgttctccttaacagccaggtccaggatatcgccttccttggaaatgcccctgccaaacatgatatcgaattcagcttccttaaaaggaggcgcaatcttattcttcactacctttaccctgacacggtttcctgtgacctctccgccctgctttaaggtctctatcctgcggacatccaggcgcacggatgcatagaacttcagagcacgtccgcctgtggtagtctccggattgccaaacatgacacccaccttctcacgcagctggttgatgaagatgacaatacagttggacttgctgataacagcggtcagcttcctcagagcctgtgacataagcctggcctgaagacccacatgggaatctcccatctcgccgtcaatctcagccttgggaaccagagcggccacggagtccacaatcacgatgtccacggcaccggaacgcaccatggtctcggtaatctccagtgcctgctcgccgttatccggctgggagatatacaggttatcaatatccactcctatgttcctggcatatacaggatccagggcatgctctgcgtcaatgaagcctgcaatgcccccgcgcttctgcacctctgccaccatgtgcagggcgaccgtggtcttaccggaagactcaggtccatatacctctacaatcctgcccttgggaactccgcccaatcccagggctatatccaggctgatggagccggtgggcactgtctcaatattcatatttgctctggaatcccccagcttcatgacggatccttttccgtatgccttctcaatctgggtcagggcagcgtctaatgcctttaacttctcgtctttattcatatcgcggttgattacattactcttctcttctctggccatagtatcctccaatgccttccatgcgaacaaatgttctctaatagttacaataatagtatagttcccctaaaatgtcaacctctattttcccgccacgccccttttttacgctggtttcatatgacggccataacgctatcctgcgccgctgccggatggtttccacagtacctccctgcttctttcatactgctttcatactgctgccatactgctgccatactgcttccataccgctgccatactgcttccatactgttttcctgtctgtcatacaatgtgaattccgggcgaaacgccccttacaggtgcctgtgcacgcaccccaacgcctgcgcacaaaaacgcagtgccaaagccatcacggcaagaaatgccgtggaagtagtatcagaatatcatagaatcatgctgattgcaaggatttcctccggacacgctgcccggccgggacttccccgccgggcgccggcttaccttcctcctgacagcatataataaacattgggtacgaaccgtctcatagcgccgccaatcagggcgctgaccgccgtcatgaggacgggcatcaggatgaatgcagccagggcaatgaccgcgcttcccggaaaagcagccgcggctgccttgttgataaaccttacccaggcaaaatgaatggcatacaggaagaaattatgcttcatccactccctggcatcaggaaggtccgctgcctttacagccaggacagctccgcagactccccacagcctccaacatacagtgtaaagcggacgctcccacaacagtcctccgaaacggcccaggtacagaagaagtcccatggcagtcaaaagaatggctcctgccgtcatattcttccggaccccagttctttcctctattccccttccccaggtatccctgtgaaggctcgcccaggcagctgcgcagaaataaaacagggcatccagattaagaaggggcatggcccagttcttccaaaggccaaaggccatgattcccagggcggcggcgcccgttaaatttccccgcatcacagtgtaaaccaggggtgccagcgccaccagaagaatcagctggaacagataccagaacaccgggttataggaatagcacacaagggcgtcaaaaagctgggtcccgttaaagggtatgggcgtctttcccaccactccggacaggcccggcaggcgggtggccgccacatacccaatatagtaaagaaaattccacaaaagatagggcagtaccaggcttcttatcctggaacgccactttggaatgagcttttcccagcaaaaaccgcgaaaaaacagataggaggacaccatgaaaaatcccggcaccgctatctgtcccagtctctctcccagtatgcgctctatccctgcaaccttaagggcagcctccggggtccccataaacagctccccattaaaagagtgcacccacaccacaagcaggctgaacaggaatgtaagccagtaaatcttgtcgcggaactgtttttcttccatatagtatcttccccctgtcccatcacaaatgtcagaaatccaaaaaggccgccccatgacctgccttaagcgccgcagcatgccccggcaggcagatctaggaaaacggccttttattctttacattgcgttcctgttaactgcggtactgagccagcagccggttgatccgcttggtaggcgtcagcaaatcgctcagggatgcgtcatgattaaggttgtcgataatgagggcaatatatttgctcatatccacattaatatagtaaggtctctcaagaagatccggagtctgatataccaggttcgtggtcagtatccggtcaatgattcccttatcataatactcgtcaaactttgtaagtccccctgtaaacagaccaaacgtagcgcacacaaaaaccttcctggctttcctgcgcttcagctccttggccacatccatgacactctcaccagaggaaatcatgtcgtcgatgatgagcacatccttcccctccacgctggctcccaggaactcatgggccacgatggggttgcggccgcccacgattttcgtgtaatcgcggcgcttatagaacatacccatgtccagccccagcatgttggcaaaatacacggctcttcccgtgccgccctcatccggactgatgaccatcatatggctgctgtcaatctgcaggtctgtctcattctttaaaagatattttaagaactggtagatgggctgaactgtctcaaagccccgtaaaggaatggcgttctggaccctggggtcgtgggcatcaaaggtaatgatattctccactcccatattcaccagttccttgagcgccagggcgcagtccagggattccctcccggaacgcctgtgctggcggctctcatataaaaacggcatgatcacattaatcctgtgggccttgcctgctgccgctgcaatcacacgcttcaaatcctgaaaatggtcgtccggtgacatatggttggtcataccgaacagggaataggtcagactgtagttgcatatatctaccatgatatataagtcgtcgccccttatggactctgtcacaagtcccttgccctctcccgtgccaaacctgggggttacggcattgatgatgtaggaatctctctgatatccggaaaatgcgatggtagacttgtgctcgctttccctctcccgtctccagtccaccagataggcattcaccttatcgcccaactccgtacagctctttaacggaatcagtcccaacggacccacgggaatggtttcaatgattttctcctcatataacatggttaacatcctcctgttttttgccggaggccttcttacccggaccggcatatacttttataccatcattctccatggttcgtcaaggcccttgtaccccagaaatgccctaattatacgttacttttttaacagtctgatatctcctccatataatgggataatcctgtatccgctcataatcctggatgtaacacggtctgtataggaatccctgagccgggccagggtcaggttggtggatatgatggtggaacggctcatgttcatccgctcattgatgcagtaaaacagctgggaggaagtaaagctgttgtttaactccgttcccagatcatcaatgatgagaagatcacagtccaggataaaccggtacatgtccttcatgtcctccgcattatcataatcaaacttattcctggaaaatacatcaaagagatcgctggctgtcagatagatgacagaatggaaatcatccatcagctcccttgcaatacagttggtgagaaatgtctttcccacaccagtgcttcctgtaaacaggagattatcatgtttcttatcaaagtcccggacaaactccctgcatcccgccacgacccggcgcatgtaggccgcattggtaataccaagctggggaagtatctccgtatcatcgtagtactcataactcagggcattaaaattctcccgctccagaacatcctccagattggactgggcatggagcagcttcatctgggcctgaaggaaacaatggcacttacggccgtctatcagtcccgtatccctacagtccggacagcggtaatgaagctccaggtaatcgtcaggatagcccgcagccctgataataagcgacttctgctcccgcagatccttaaggtcttccttcagcctgtccaggacactcttatccccttccagcagctttttggcgcacgccacggaacgctctgcgatttccgcttccagctgccttactaccggcagcctggcataaatctcttggcgccgctcctccagtttgtggtggttttcgatctgctgccttccatactccctcatgattgcgtcatactgggaattgctcagtgccatggttcactctccttatgtgtattagggctgctgccccacccactcctttacctgctttaagaccagcgcatcatagtcagtatccctctgcttgaaattatgaaactggttggatgaattcttcctggctcctgagccctgcctggctgacgagacgccggagtcatacttctgcagcctcttctccctggattcaccgctctcctccctggcagccgtgcgctttgcgtccaggtcctttatatcagccaggccccggacgccggccttctgccagtctgacaaaatcttgtccgcatactggaagctggggttgtggatggccgtaatagtcctgctgcacgcttccaataccacttccctggaaaatccatagtccctgaaccatttgtccatcagcttctgctccggtgcagccggcttcctgttattgatgccaaatgccttcataaccgcaaaggaatcacggttgtaggaagcgctgtaatccttggcctccagcgctgtccttattcccttctcatgccagctcatggccacggtctccatgtaacgcaccgatatgtggccgttctgcacacagtattccaccagatactccaagagctcgctgctcatggataagccctcatacagataggcaaacacctggcagtctctgggagtaaatactttattcatgtacttctgggcaatatagagaagctgggaaaactcctcgtcctgagccagacggtttacctgctccgtggaatacaccggaatacagccgtcctcctggcccgtggtttctgtgcgctcccggacaacggccggctcctgaacaacggccggttcccgcatgcctgtcatgccccgtacctctgcacgccctgcggtcccggtttcccgctgaaacggctcaacccgcaaatcaggaaccgctgcctgtcccccatcctgcccacgggtaaaggtatggcctccggactccgggcggaccggttcaccctgaaccggctgtccctgttcagaggcagtcagcactcccgccttcttccaataggagagggctctgcgaacatctgactccgtatggtttaaggcatccgcaatcaactctatggtgatatcctccccctgatgacggagcacatagaggtacaccttcacatattcgccgttggcagcagccatatatgtatcaatgaattcattggccacagccgtgaccggaacactccatctatccttcatatttccacccatccctaccactccttgcttcattctatcataacacatccactgccaaaagaaaataggcgcggttttgcacactctttgttgtggataatgtggataatgtggaaaaatggtggacataactgtccccgttcttcataaaactccatttttaccgtataaatccaagattttttaaatcgtgcgacatttttttatgttaatcaaaaaatccacatagtttctttacataaaatgttgaaaactatgtggataatgtggataactattgtcctaacagcttttctcctacttttacaatgtctccggcccccatagttatcaacaaatcgccgttcatacaattttccaaaataaatgtttcaatctcgtcaaaggacggaatataatgggccttcgtgcccagcttctcaatccggtccgccacatcccgggagctgacccccagggtatctgtctcccgggctgcataaatatcagccagaaccacttcatccgcagcagacagagcttccgcaaactggtccagaaacgccctggttctggtataagtatggggctggaacacacaccacagcttcctgtggggataattcctggccgccgccagggttgcctttatctcctgtgggtgatgggcatagtcgtcaatgaccgtaacacctgccacctctccctttttctcaaaccgtctgtccgtgccagtaaatcttcccagccccgacataatggcgtcaaatccgacccccagctccaatgcgatggcaatggctgccagggaattatatacattgtgctctcccgtaacgccaagggtgatgcggctcactgtctctccctggattaccaggtcataggatggcctggcaaacccgtcatatgttatgttacgggccgtgtaggtactggaaagatcctttccgaaggtaaccactctgcacctaagtcccctggtgatttcctccaccttctcgattccgctgttcaccaccaaaagtccttttgcgggaagcttctcggcaaacaaacggaaggaatggcgtatgtcctcaatatccttaaagaagtccaggtggtcctcctcaacattcagtataacctccatggtgggataaaaggacaggaaactgttggtatattcacaggcttctgtcacaaacaaatcaggaccgcccacacggatgttgcctcctatgtcctttaaaatacctcccacggagatggtgggatccagatcgcctgccaggagaatatccgtgagcatggacgtggttgtggtcttgccatgggttcctgaaatagctatggcctctttgtaattgcgcatcagctcccctaaaagctctgccctggaaagcatgggaagcccttgatccctggccgctctgaactccgggttatcttcatggatggctgccgtgtacaccactacgctgattcccggctccctctcaatattggccgccctctgtccgtaatatacccttgctcccttcgtttcaagatgctctgtaagagctgtctcatgggaatcagagccggatatggaaaatccctcatccaaaaggatttccgccaggccgctcatgctgatgcctccgatcccgataaagtgtacatgttctggtttattaaaatctatctgatacataatcaataatccttccctgtgcctgtcatacattttcctgcacaaaaatatctcttccttattatatcaaaaaaaacctgaaaagctatatgaaaaatggagaaataccggctccccggcactcctccttgacagacctgatataggatatgcgctttgaccgcggcttgagcctgctcaccctctatccaaagcgtttttgcacattaaaaaggagaggcgccatgttccgctcctctcctgattgattcctatgtttatctccttatctcctgacagcgattatgctgcctgctgcctgaaaaccaggttcttataccgctcaagtgtaatcagcagcgcattgcccagcacgccgattgccagaatctctccgatacccactgtcaccattgccaaaagaatcatatcctcagaaccataggcatatcttaacacccatggaatgataatggtgttagccataattggaggaatgcacacgcaccatttatgctttctcagataccatgaaccggctgcgccaattaacgtggccaggcttccgaataccacgtccagcggcatggccccgcagagcaggttggaaagcaggcatcctgcgaatagtccgggcacagctgccggcgtaaagaacggcagtatacaaagggcctccgcgattctgaactggaccgggccgaagctgattggagcaaataccatggtaagcgccacatagatggctgcaatcatggccccctgggccagtccgtacagtttcctgttgttttgtctcatattctgttgtctcctttagttttgttttaggtgtggaaggtctcgaacacaccggtcgtttgttgcagattgtcccggaaatgctgataatagcagggaatctgcggccttattgcaggggatagtgtagcatattttcagaggaaacgcaagccgtacccacaatttacccacaatcaaatatccgcattaaaaaaggccagtttcccggcccttaaaatgctttcgctatcagctccatttcctccgccctggttgtcgggagtacatgggaatataaatccatggtcattgacagggtggaatgtcccaggatggtctttaatgtctgcggcttcatcccgctttctatagcccttgtggcgaatgtgtgccttagacaatgtggtgtgaaccgctcaaacgccataccatccccattaatccgtttcacgattctgtcaatctcattttgcagccgctccctgctgataggcgtaccatccggcaaatgaaaaatgtatccgtccatcctcagcaccttttcaccataaggttgtttctgtctgtccagaatggcaatcatgtccttagtaaggggaatatcccttctggatgtagttgttttgggtgcatcctcaaaaaatccccggcctgatgcatatttaagggttctttgtatgtgcagcaggcctaccgccttatccacatctgaaagcttcaatccccgcagctccccaccccttaatcctgtcctgattgtcagggcaaacaggttgtataaatagctgcctttggcatactccatgaaaatatcctgctcctcctttgtgaatacccggcgctgtccctttggccttcctttaggcagcattgccaatggaacggggttacgttctatcagcccattcttcattgcctgtttaaagcagccgttaaggattgcagaaaccaccttaatgcttgaaagcgccattcccttcttaaccagattgttatatagtttctgtatgtgttctcccctgatatccaccaatttctttttacccaggctttccttgatatatatattgaaatagtccgtatatgaaatgatggtcccggccttaacctggttcaccttatactgctccatccaggttttgaaccattcctccaccgtaatctttgaacttgccacaaacgccccatgctccagcttataccgcagttccatcattctcttttttacttctgtaatggtatccccatagacagaatgactttggtaatccacctttacccggccctcatacttcccattggcccgctgccggattcccggcggcagaggcttaccattcttatccactgccatacaatcacatccttcctatccgcggccagggtactattcccgccccggccactccatacactctatcatgaaagcaattccatacttaaatccgtttataaaaccaaactcttggccgcaacagctcacctccatacaaatttcctccagctcctcgaagtcctcccgttccctcaaaggttccattacctgttttagttccttgcgtaatggctccagggccgctgccggctcagttagttccccatagatgaatcggcatatctcctttaaaaaccttaccataactaaccttcctccctgaatcacgtcatacactcgaccatcatcccaatgccctgtttaaatccacatgtaaagccataccgttgtgcgcacgctaccatgtcataacaaatactggccaattcttcaaaatcggtacgtttctttaatggactgatgatttcatttagttctgcattaaatgcctccagctccacactgggcggcagaatcccctcatttatctggtcgtatatcttccctatcgtattaaacatcataattttttcctccggttcaaattctcatttctaaccttttgtgtgtttagaggcggtgcgtcgatgtccgggcattttctcctttaccttcggctcctccgggggatgtgcattatacgtgttttctctagcaaccaatatgcttatgtagattcgccacaggaacttaaggtcatcaacatcctttaatgcgctcatgatgcactttctacgctcctgagcaacattttttctatcctcttccgccacacttttccacccctttcatattgtagaaacagtgaatgactgtataaatctgctgccacattctgaggtcctgttccttccgcaatgcctttaaaagctttaatatctctctttgatacacggcaatcctactctccctgttgtctcccatgctttcatcacctcttatttagcagccttaggataaacctatatattaattccagtttttcgctatcctgcgcttcttgtatcatgttaataatcatctgcttgcaaacgtccatcttacaccgttaccccgcaatttcccgtacaaagtaatagatatcttttacctcaccggattccatcgtttttaacaaattaatgattctctctatgtaccatggctgttttcgctgcctttccccctgtaaatatccataccgaaatgcgcagcagatggcggcggctgtatctgtgtgataatccataatctcctgtatttctggaattgtcatatcatattgggtatctatcttccctaacatatcctcagatttttctatcacgcttttactcatatactttaaattctccttttcccaggagaatcacaattcgctgcacgacaacattctcctttacttttaggttgcaaagggatggttctgtgatataatcagaatatccctatcgcattggtgtgtggtcgggtattgttttttcagccctgtgcgtttgccgacgcatggggtttttcaataccccgtctctgtgttacgttttggtgcttctttgctttgggtagatatttctaccatgaaaacagtttaaacggtcattcctggttctgttccttggatttcagatacagaattgattctgtgcagctctttcattctgtttgatagttctgttcgctgcgcctccgtcaattcccttttcgtatcctttgaccttacggttataaacctctttggaaagatgtaccgcttggcaactaccttgtcctggtatatctcccgcctcccctccttgaattgctccgggttctgttccaccagcttatccagcttgcgcatccaaaccgggtccgccgtgtaaagctctgcggtatcctccgccgcattaaatcctataataacctcctgttctgtccttgacaggttatagtctgccatcctgcaatctcctttcctggtgtgtggccccggcagaggctctatgtaattgccgttactcccctctgccggatgctttgctttctcagccctgtgcgcttactgcactgtgaatctcatggtctgggactggcccatgtatttctggtaaagtttcggatggtctgcggcaaacgccttggtctgaaacttgttgctgatgaccgccttgaatctgaccatccaatcaccaacctctgtttcctcctggcccctggtctgcatctccttcttgatatcctcctgcagggcctccatttgcttctcaatggctttcttttgggcctccagggccttaaggtctttaacctttttaagtaatgttctctctgacatagcgtgttctcctttccttctggtggattcttaccgggctattgttcgccatccgtggcgcatcctcaccggaattgaatccgcagcccctaccagtcttgcgtgtctattgcttgcggctcacaggtacgactgataggtttgtgggggattgtctgccccggctgcttttgttttccttgaccttgtaattatattataatatatgtgtacgtatatatcaatagtaataacagccaaatgtgtacgtatatatttggtgtttttgtatgtgtacacatcattgactttatgatatactatcattgtaaggtggagtagataactgtatttttcaaccccctattacctataattataaaaggtggtgaacatgtgtcattaacagaagctcaaaaaaaagcgaatattaaataccgtaaagaaaatcttaagcgaatcccccttgatgttcaaaaagagaagtatgaggaaattgcctctgctgcctctgctgctggtgaatctgttaacggttatataaagaaagcgattgaccagcgcctcgaatctgacaacaccgcacaggaaggagcgtgaccctatgccattaccaaaagaacgaatctataccattgatgatatttacagcctgccagatggggagcgggccgaactgattaacggtcagatttattacatggccccacccagcacagcccatcaaagaacattgtcattcctacatctggaaataggaaatcacatccgtaacaagaaaggctcctgtgaggtattcccggctccgtttgccgtgttcctccaggcagagaacgaaaaaaacaatgctaattacctggagccggatatatccgtaatttgcgataaaaacaaattggatagtaagggctgtaatggtgcgcccgattggattatagaaattgtctccccttccagccgccaaatggactattataaaaaactggccctctatcagggggccggggtacgggaatactggattgtagacccggccagggaaattattgtagtctatgatttcccaaacgaaacaccccctaccatttaccgattcactgattccgttaaggtcaacatatatgatgatttttccattgactttagccagctcaatctttgataccatccacattgcagcagaaccataactggactgctgctttttttgtccctctgcccttctggcggaatccgccaaaactcatgacagcttgaattattgaaccgcacggaatccgtacagttgtgacgtcacaacttttccaacgtgcttatctcaccagcacgttcatcatggctcagaaccataaccattcaaccagattgttgaatgccttcccagactgttgggaacccgtacagtatcggcaccgcataacagtaacatactgtgctttaccgtataccaggaactacagtccgtttcccggcctttcacttctcactcaatacttttatcacccggaatgtttctaacccttctctcccgtcctgctccttgatttcccgcatagaattgatttcagcgcttcgcacaccctccatattgaagtgtcccctctgcctgcggccaatttgcggacgttccaacatattccaacattagcgttccgaacgctcggtattaccgcgccgaacgttcgcatagaaagccgtgcatccagcgcacacctattaactcaacgttaccaatagagtactccatatagtaacggagtactgcaatagaaaatccctagttttccctagcaatcgtgttgttttgctgtcattcgtttcggtttaaaaccttgacaaaccttagcatttgttagcatttgttagccttaacatttcttaacattcgtttgttttgtttgttctggaaaaaaccatattcgtggttttgcaaccttgtatatcatggtattaatgtttgttttgcaacctcgtccctacatgataacgaggttgggttttgtcaggttcctggggataccatatcccgatattccagaaaacgaagagggttcatttcttcatccctccaacgcggttatttttgttttaaattgtagctgctacaggattcctgtttttaagacctccgaaatcctgggatacatgcccgcataacgatgtcccgttatcctttttagggcctcacaaatcccaccatacctactatcccccggcattcccccggcgttaaactccgataccgtgtttatttttctcgctgttccctcgccgttcacggcttcattttctcgggcttcactcggggttcaatcctattgcccctgtagttccccagtggttcgtttcctccacttcctggggaaaggatatcatggaattatcctttaagcttatccttgttgcgatatcgcaactttctgtctcacccgctccagcagctccaaatgcatccggcgccgttcctcccagtccatcatacccagggccactcgctccgtgctgctggtccaggtgcggttgaaattccccgctccgttccccaccagggccatactgtatatcctatccgcatctggcaggaagggccgcaaccgtttggcatacctgggcttacgcaactcccgcagagccttggcttgtatctgtcgcaccgcctcccccgatgtaccatattcccggcctatggcctccatggtcatgttctcccggaaacgcatcttaagcactgccagctgctgccctgggagactacccacacaatcccacaactcagccttaagctgttcctgctgcatccgttccacggtatccccttccatatcctcggcagaggccaccatatcccctatagttatatcctccccgccgtccaggcatttcactgggctatccaggctccccaggcgggccatacaggcgctttccctgataccctctatctgtcccgggcttacacccataaaggccgctgcctccctgtctgacggctcccggccatattcacggttaaaggcattgcagaggcgcttatactgctgcaccttctccagacagtggacaggaagccttaagcaactgccgttcatctggagataccggcgtatccgctgccggatatggtattccgcataggtaaggaacttcacgcccttagccgggtcgtatccatcaatggcaggatacagggcaaggtagccttcctgctctaggtcctccagctccccgctgtcccggtacttccaggccacggcatggatgaagcgccgcacctgattatatagctgctccatgtttccggccacatcctcgccggccttaatccgtatcacaagctgctcatttgataattcctcggggttcactcggggttcaacagtgatttcccctctgttcaactatggctccgccttgcttccttcttgcttcacccgtggttcccccgtagttcgcccgtacttcatttgacatttggcacactcctttatataatcagattatcaagttcaaagaagtgtgcctctgccgggcctgtccatctgcctatggatgggcctctttcattgccatttccacatctatgtataatgccctcataggatgctttccgtaaccgctgccgttaaagatgttctctaattcctccatttcaaaatcccccaggacttccgatatcccacagacagtaaagccttgctgccttagctccgcccgtatcctggtgactatctccatatcatcctccaggcattccggcggcgtgatggtctgcatcggcttgtgaaagtggttcccgtggctatcacagtaatctaccatgaaatttctggccgtaatcggtatccctattgattgaaacaattttgttaataccatgtgtgtcgcctccccttacaaacagaaattatcgccattgattaaccgattcatggctatacgcttctggcgttcctgctcctgttggcgctccactttctgacgctctttttcctgcgcttttaattcgctggcttttttacgttcctgccggactaataatttgggcgccaaggctgccacaaactcttcttctgaactggttaataattccgctgcttcatcatcccttgtgtatactccgttaataatctcaatcttcattgctcattctcctttttttggtaatctcattacaggcggagatttaaggcggaaaaagcggaggatacattacagtgaaaatttcctgtatttatgggcctttgagccacctttttatccggcggagatttttttccagttcagtgaacatttttaacactatgtttcttattctacagactaactatgttgcatttcattatttaaatattcagtgaaaaaaatctccgcttctccgcttctattgattttaaaggatttttgcctccgctttggcctttaaaacctccgctttccctccgcttttgctccaaaacctccgcttttattttatgtcaactaattgaatggtatttttccttgtgtgtactcttcctgtgtaacgccttggaatccctcttccttctgtttaaggttcctgtacaccatcacgcccctctttccctccatattagccttgtctgccgggcatccgttggcctccatcctatcccggatgttctgcttattcacatgggcgaactcattcaacatgcaccagttcatatatgcgctgtcaaaatctgccttaagcaccatatccgccctgtctcctgtaatgatataaaattctgacagataacggaaaacagtatccagcttttcatggtaatcctttatggcttcctcacaggcagaggaatgggtaattttaaaattgtggtcaatcagcctgtgcagcccttccaggaaccagttaaagatagcgttgcgctcattcagtatcttatccagtaatgcactgtcccggcgttcctgctctatggtattcgtgcagggcaccacacacaaccgttcaaagatatgaccgcccttatcatcctggaaactagggagattgttacaggctatggcaatccctccagggaatatgtaatagaatggctgtttattctttggttctatcttcacagcgtccccgcctgtaagctgcttaaatacagagctgtcctttatctcactgcccgtctggtcccctatgcttatcaggcgtttccctatgatgctccccagggtgaacttggaagcctcattcatttgctggatgggaatgttcgcaatcttatctgtccccagcagttcccccacaaggttaagtatctgcgtctttccggaatttcccagaagtgaccacagcaccagggccagctttatccgatataccttcacattggaaaggataagccccatatattcctgaatcacggctttcttctcctggtccaccttcccttccctgtcgctgcacaggtcattcatatagcggtcaaatactgaccgggccgtgtcctccgggtggtactcgcaatttagctgtatcgtgctgcgcaacttcggcgtgtgtggctccaacttcctggttttaaggttatacaggccattcttaagatttatatatttctcgtctgtatccaaatcccggaacgtgcatatattgctgtccttacataagagaaggttgtacacattattaatcatgttgtcgcttgccatccctacagggacataccgccgaatgagggattttaccttgttgcggttgcatttgttatatactccgtcctcatacaggtaaaaatcgtccttatcttcctccggcctcctgactatcagatagggcaggccccggctgatactgtcggccagtatgtccccgtttattttaaccttggcccgcgctccctccccatccgtgaaaagccatggagcgccccggttctctgaagctactatcaactcgtcaagttctaccttgctatgaccttcctttgtaaggtaatctgtcacatcccctttatcagccatggacgtgattgtccagcggatggaatgagcaaaatgccttaaatcactcactatctggtctttcagcctcattcccggcccatcattatcaggaaggattatcaccttggccccagcaaaataaaaagcatattccctacaccaatcgctggagctgccggctgtagttgccgtatatcccagcttgatcagcgtgtcggcatctttctctccctctacgatatataccgggtatcctgccttaatggcccttatcagggaaggaagattatataatactgcatggtcacttttcttgcagtacttatatgtatcgttctgcctgtctatggtaatgtaccgtatttcttttccctcaaatcttaccttggaatagagatagcagccctccgccgtcttataatcatatatggcttctatggtcttgccctgggcaaattccagacgttccttccactggggcggcctgtagtcccctaaatcctggaatgacaggcccacttcctccagaatgtccttagtctcacatcctgcatgacagtgcagcagcaatttgcctttgtcctccgatatggtaaggcttgccttgctgtcatagtgcaccgggcatttacattggtaagaggccgggccaatcttccttgatacctcgaaatgcgtcaatagttcctgtaaagtaatcatatatttcctgtatcctcccactgccgcagcagcttccttgctgattccaatgcccgcagcgtattcctgcccctgttctccagcgtctttatgaaatccttaacctcccggacgtttccaggcaggaaataccctccgtcctcctgacaggtggatagtatcacagccccggccgctctctccctggcaatctccttttgcagttcccggacggattcaaacctcaggcggttacatagcgcttctgcactcacgacgttctccttcccatgggggaggatatcagcaacaaccattcgtggttccttcctatttacaggttccacggttgccgccgctccctgcactggtgtgtggtcctgatgttcttctttcagccctgtactatttcttttattcatggcttatacccccgtaaggtcattaagatactggtcaatcttcaccttgtcccataggacacgctttcctatcttaacctttgcgcctatctcctcccctaacttcatagcattattgcgccccaggttggtataggcccgcagctcctccgtgtccataaggcggctttctcccgctactgtgttcattgctcttgctctcattgcgttggctcctttcttgatttaaggtgatttaacaaaatgtaattggcttacagaaatattatagcaaacatccgttcttctttctgttgcctatacataaatcatttgtttatcatgatttaaaagttgcttgcctgtcactttcctatgtgctaaaataatgatatcaatatcagaaagaaatatctatattaaatatagaaatataatatcagaaaaaatttcaaaaaaggaaattatatgcaacctataccgttaaaaaaggaaacttttataaagaatatttccgaaattacgaagggaatgaaacaaaaggaaattgctgccattatggggtgtacagagggtacaatgtcaaagtatcttaatccagataaaaaagacttccctcccgttgataagctgtacaaccttagccagcactttaatgtatctatagattggctgattggagttaaaaagaaaaagaatacaggccaaaaactatcagcaagagaaatttgccatagtataatagaaatatacaactctttgccttttgattttgaaacaatctccaaaaatgaggattgttacatttctaacgaatggggtcggggtagtacatataaaaatcaggataatgcttacttaagcatttattttacgaactggtccgttttgggcgagggtgagggtgagtatgtagacccttttataatagatttaggaaatgatagaccaaaagcaacggaagttaacagctttcttttacgttttcaaaaaatcaaaacaatgttctctgagggaaatttggacaatgaaatgtatactatcctcttggaaaaatatttaagtgaggtttctaatgatgaataatccacaagccaggcgcaccccctccgctgcctggctcttctcatacccactctgtacccacacaacgataaatcattataaccaaagataacaaaaagcaccacgaaaatactgattcccagtaccccatggcgcatgataaaccgctataaataagcagtttttgaagttttgttttaggtgtggaaggtctcgaacacaccggtcgtttgttgtgaaatccctggaagtgccgggttttcacggccttattgctgttaatgagattgcaggtgacaggtgtctgcgctgtttttacaatcccgccaactgataaagtataacatcaggcgccatgattttcaagacttatttaagagtaatctggctattaatctggctatccttcctctgccagtaaagctgccccaattaacccggcatcatcaccaaaggctgcaaattttacttttaagttttccggacagagtacataacgttttgccttttcaaatattttctctacaaaatccggattgtgcagtgctaccgaccctccaataattatgatatccggatcaatcgtacatgtaatattgccaataccttttgccagtttttccgcagcatcctctataatctttaaggccctcacatccagtcttcggtatctctcaaacaattctgatgttgacatttgtctcccatacgtttccgatgcaatcctctgaagaccgcttccgctgctttgctcattcaatgaacccgcattggcatttttatggcaataactgtcgtcattcactaccatattccaaaattcagccgcattggagttcgctccaatcaccagtttatcctgatacacatatgcccctccaattcccgtggatattcccataaacaccacagattcatagccagctcctgcccccgcccttgcttctgctaatccagccaaattagcatcattatttaatgtagtgcatatccccgtccgttcctccacatactttacaatctcaaatccatcccagccaatcagatttggcgggcataaaagtttacctaaccttatatccatagttccggggcaccctattacaatccgcttatactggtatggtttactaagaataaaatcaataagcttatccatattaaaggcagctgttatccccttatcattttcagtccgatagctgtcagtcatatttcttgcctcgtcaaatatagctgcccgaagctgcgtacccccgatatcaaatccaactgttttcataccttcctcctgaaatgatgcgccagcgtgtgcataaaacttcctagcaatctgacattgtctttcccgttccgcacaattgctcaaaatcagaaacaaaccgttctacggcggccgttacacattcattttttatcatcccctccataatgtccggtgcaatagtagaagcaccaactccatactcgcacaattccaatatctgctgtgaattcttaaaactggctgcaagtacttctgtcctcataccatttcttttgaaaatatcatgaatatctttagctgttttcaatccatctgcacccagattatctatacggttcacatagggtgccgtataatcggctccagctttgcctgccaggaaagcctgcatacgggtatagacagcagtggctgtcacattcaccccttccatcttcagtgcctttattgccttaagcccttctcttgtaacaggaactttaatatatgtattctcgcccaattcctttaaaattctgcgggcatcctcaagcattccttctgcatagcccgcaacaacctgcacatgaagttctgcttcctgacctatgtattcccgaattccttttaagatttcaaagggcggttttccggtttttgcaagtattgtgggattggtggtaacgccgtctacagaataaacaccgtatatttcccgtatcttttccaaatctgcatcatcaattaaaattttcatatttcttgtcctttcatcctttttatggttatatcacatttatcactccgttagccctggcaatctccttctttttctccagttcctggcgagaatatgcctgaggattattcttgaaacaataggctttatccacaagctgatactttgcttccgccaatggattatagttcaacagttcataaaaaacccctttgtagatccccgatatgaaactgctgatacctgcaatattttcccggcttgtggtaagtcccgggatcatgggtgtgcgaataatcacactatccctcttctcaccttccaacagcagacggatatggcctttgatacgttcattacacacacctgtgtattttttatgtgtttttgaatcaaatatcttaaaatcagcataaatcaaatccaccaatggaattacagcttcaagaatctctgtatctacatataaagcactctctattgctgtatgtacctttctttttctcatttctttgagaaacggaatcagaaaatccggttggctcaacggttctcctcctgaaagggttacccctcccccataccggtaaaatggggcatccttcataacggcttccgccgcctgactgacagtcatgactatactatcccaccggattgcacctgacgggcactcttctatgatgtactcccagtcctccttcctagtggcatcaagccttatctgattcccttcctttacgatgcccccatgctccgcaaaccggcagcaggttccgcatccaatacacctgtttgagaaatagataggcctaacccttgtgctgattccttcaggattatggcaccatacacatgatagagggcatccttttaaaaatacagtggtacgaataccttccccatcgtgagtggaaaaacggcggatatcaaatatagttcctgtattttcattcatgattctcctcctaccaattccctcccctgttttctttcactgattaacatgcccatcatatacctgcataactggttcttgcaattatttcatcctgtaattcctctgccagttctgtaaaatacgcagtataaccagccaccctcactgtgaggctgtgatactgttccggtttttcctttgccgatatcaaatcttctctgcgtacaacattaaactgtatatgtggtatctctaaatcaacaaaggttctaagaaaccgggcaaactgatccacgccctgctctgtttcaaaaaattccggcaaaaatttcatgttcagcaatccgccgttgctggtcagacttttatccagcctggaaacagatttaagtactgccgttgggccctgggtatcccgtccatacacaggcgacatgcctccatcagccaacggtgtacctgcatgccttccatctggcgaagcccccacattctctcccataggaacatgggctgatacagtgtacataccagtatggtatattcctcctctgtaatttctatacctggataaacggtctctgaatcgctcagcccatttagctcccatccggtccacccactccacatcatttccatatttaggcgctttatataataaaatggcacgcatggtttcccatcccttaaaatctgaataaagggcttctaaaagctccgccgccgttatcctgcgctcatcatatacaagcttcttaagtgctgccaggctgtctgccagattagcaacctgaatcatctgaatacccgagaaattatagcaagccccccctgcggttacatccatacccttttcaatgcatccattgataacagcggaaaggaagggtgtgggaagaagttccatatgagccttctccacatcttcacagacctttaccattaaatctatatattcttcaagatattttaaaaatacatcttcaagttcctggaatgttctataatgccgtaaatctccataatacggagccatctgctttccagtcagcagacacctgcctcctgtcaatgccagttccagaaccttgttcagattaaacatagctgcatcgctccaccccaaattattaccctgagtggtcagctccacacatcctacaatagcataatccatagcatccttttcttctataccaattcctttaagggcagggatcactgcttcatcattaaaaaactgcggcattccgcttcccttagcaactacccttacagcctgttttaataattcatctcctgttttccgatgaagtcttacggacaaattgggctgcggcattcccaaatgctcctgggctttcagcatcagaaaagacagctcattgacaaaatccctcccctctttatcctgaccccccaccgcaacattaaagccaattggaaatcctgcaaagtattttgcactgtttctgttcctcatataaacaatctcattaaacttaatccacaggcattctatgatttccaatgctctttgcctgtcaaggcgaccttctctcctgtccttatcataatattcccataacagttcatccaatcttcccggcgaaaatgaagaggcattggattccatatgcagaattacaaacaggaaccatagtgattgaacagcctcatgaaacgtttccggaggctgttcagaaattctgccacaaatacgggccagttccagaagttctgtttttctgtgaggcgggatactataagacacattcaagccctgtgccatctgctccaaaagcatctgataccgccccatgaaatgaatggctcctgtcatcacaatggaaacactttcataaaaaatcttttgttctcctacggccgttttaagacattggtctacctcctgcctgattccagcaggccctttatgaagccatttgctgcaatccggacagatatgcccctgggcatgatccttctgattgattttcacgacttttgctatgcggtcaatctcactgccgcagcgctgccttagcacactttccagtgacttccccttccaatatggcttaatcacttcccgaaaatatgcaatatcctcctgccggacttgaaagggatcctgggccctgcccgggaggctttcaaattcctggtcaatccaagaaatgccgctctcaggaaagacaacaccttgtctgactccctctgtccgattccccacaaccagttcttccggttctgcatgaatctccatctgctccaatgctgcctttaatgccagggcacgcgtaagtattcttggcttaccctcatttgctttgtatgtatctgtaataatcttagcctgttcaatggacacataccttggctccgttaatactttttcttttaaaatacatatgcgagtactcataatcagatttttcatattcgccgcccctgccaattctccgcattattattatttattatttttttatcctgtttattctgttttcagtatattctttattacctgttctgtcaatatttttattattttatatatatttattattattatttattgtttgttatcattatttaaaaaacatgcttctgccatcaagacaaaagcatgtttccttctataatttacagccattcaaaattatattctattaacttctcctctatatcggagggcggcgcactctccaagatggcccctgaaaaattatcaagtcctgcatatttatatgttccatctgcattaaatttcctggtttccaacatcatgtatgcagctttgctcctgttcagggccgctcttttggtaatcccatcctccaccatataggtggagacactgttatcaaagacatcaacaccaactgctcccataaatgcaagatcaaaccgaaaatcttcaagctgtctgtctgtaagactccccgtaaaaccatctcttccactgctaaaggaacctcccagcattataagccttgatacagtaggtaccataaattccagcatgatatccaccatattggtgaccacgataatatttaacgttgatttcacgataagtctggctaattccagatttgcggtcgaaatatccagaaacaccatatcatcatctttaatcagcttcattgccttagaggcaatcatctgctttgcttgcgtgtttctgtcctttctctgtgacacattcagatcatggagattaactcttttcctcatggctcctccatatgtctttttaagcaaaccttttctttcaaggatagtcaaatccttgcgtatgctgtcctctgtaatctgaaataactcactgagttcctttacacgcacagagccattccgattaacaagtgccacaatctgttcatgccgttcttctgcaaacatatatcattgcccccgtttattactttttcacaattatatcatatttcttattgttgtgcacagaaatattcctgtaaatagttcatacacgataaaagtaatattcgaatttacaatgacgtttcatttaaacgtttaactaacccttataattaaacaggcccagcgccgcccatttcctgtccaacttcctccattacttctctccatagactgaatcttggcagggaaccttccccccatccgcatccgccggatataacagtttttggtcctccctgtctcagggcatcacaaaccttctccttaatatgggcctttacaatttccctgtcatctcctttgaaatcatctgacggaagataacgggcagccggatccctgtacccaaactcgttagcatgctttaatccgcctaccagcactttatccgtcagatttctcatctcaccaatggaatgcatggccggatcttgatctgaccagttaaaggcgtctaccggataatccaggaaccactctgaagtggctgcatccccgtgacacacatgagccatgttaaaccatgtcctgttcttaaccgcctcaatatttcgtatatcatatttcttgccaaattcctcaaacatttctttccccatcagcttagccattccacactgatatccaaaaaagaatcctgatgctcccgcatccagaaaagcttccataagcttttcattcgtctccgcgatcatctcaagagctggcctgcagtatttctccgaatgtataaagtgggacacaatcgtttcctgtcggaaataaccgcctgtcatttcccccatccatataaatgggctgaatatagtaggcagaaccggcacctctccctgaaaatggtcacatatccgtttacatgcctcgacctctctgccaagagcacctttttttacatccggagccttcagccttgcccattcatgaggatcgtttaccgcattcaccgttacattaagccaggtatcatccataatatgtgctgcaggctttatcttctgcccaaaatcttctgtaaaatacattccatttgacataagtttgataaaatcaaattggtagctgttctggtatgcaattgtagcctccgtaaaatcctttacatttctgtcaaccaagctcatgtgcggcccccatgctgtatacgcaggacggtccagaatccgtccttcctttactgctttcagcctctgagtatgtgtaatcataacttacctcctgttaatataatatatttattcctcaacaaggcctccgaaataagcctgttgaactttatctgattcaagcagcgcctgagccgtatcagacaatacaaccttacctgtctccaatacataggctctgtgtgaatgttttaatgctactttggcattctgttccaccaacaaaatggtggtacccagctcgttaatccgctttatttccctgaaaatctcgttaattataagaggtgcaagccccagggaaggctcatccaaaagcagcagttcaggctgtcccatcatcgcccttccgagggccagcatctgctgttcaccgcccgaaagcgttccggccacctgactctcacgatcctttagttttggaaacaggtcatagacaagtcccatacttgtcttaactgtggaatcggatctggaatacgctcccatcaacagattatccttaaccgtaaattcaggaaatatctggcgtccttcaggtgacaggataatccgtttatgtacaataacccgggtatctttgttggtgatattatctccattaaacgtaatcgtcccctggtcgcatcgttttaggcccatgatagttttcatgattgtactttttcctgctccgttggctcctatcagagtgatgatttcacctttatcaaccgtcagatttatcccctttaatgcccgaatgctgccataattaacacttacattcttcaactccaacaaaggcatcacaatcactcctttcccagataagcttccacaactgcgggatttgcctttacctctgagggcgttccgcttccaatcagtcttccgttatctaatacataaatacgttcacagatattcatgacaaacttcatatcatgctcaattagaagtacggtgtatccctgacgtttcagttctccaatagtcaacctcaaggtttccgtctcagactcgttcataccggctgcgggttcatccagcaaaaggagtctggggttactggccaaagccctggctatctccaggtcccgctgtgacccataaggcaggctggttgccatttcatatcttaagtcctgcagttcgaacagccgcagcagatcaactgccttcttttcacattcctccatctcctttctctttgccctggtattgaatatggcagtaaggagatttgtctttgttctggtatgcatcccgatgagtacattgtcaaggaccgtcattctgcggaaaagtcttatattttgaaaagttctggcaaatcccagctccgtaactttatatggtttccatcccgttatatcctttcccagcatctccactcgtccctcagtgggattatagataccggtgatacagttaaacagcgtagatttgcctgctccattaggtccaatgattccaacaatctctccctcattgacacacatatccacatgttccagagctaccagccctccaaagcgctgagttagattcttaacatttaacacctgactcatggccatcccctcctgtatctgaatcagccttccatgccattctctgactgatatacttaaagttcacggcgccgaataacccctggggccttaccagcatgagcactaccaaaagcacaccataaatcagctgccggtacagcgaaaaacttctcagcagttccggtataaccgacaggacaatggcacctaaaaagcttccgaaggtgcttcccaaaccgccgaatatgaccatgaccaacatttcattggattttgtggaggcaaaattcgtagggtcaatataacctgtatactgtgcgtaaaacgctcctgccagccctgccatcatggaagaaatcacaaagatcatcaccttgtatttgaatacatggattcccatggattcagcagccagctcatcatcccttattgccaatactgcatttccgatcctggagttcatgatattatggacaatcacaccgcatacaatcacacaagccagaatgaacaggtataattgtgtttgagacttaatctcaaatccaaagaattccggtttcttgatagccataatacccagaggtcccctggtgacgctcatccagttcagctccacaattcggataatctcgcagaacaccatagtgacaatggtaaaatagtaaccatttaatctcagtacaggcatacccagaaaaacaccgaaaaggccagacataagaactgctgccggtagtgtcacctgggatggcagccccatttttgtgcagaggatagccgctgtatatgcaccgattccaaagaaagccgcatggccaaaggacatctgccccagcattccgctgagcatattaaggctcaacgccagaattacatacatcaatgcgattgtagcgattctgataacatattgtgatttgaacagaaatggaaatacaactgccaggacaagcgtcattcccataagtgggtacttataacgaatcagaatacaactgaatttttctaacattccgcttctcccttctacactttattaatctgtttcttgccaaacaatcccacaggacggaatagcaaaatcacaatcaaaacagtgaacgcaatggcatcccggtatccggaactcatatacccagctacaattgtttcaataactcccatgcaaagtccacccaccacagcgcctggcagcacacccactccacccagaatagctgacgcgaatatcttcataccaatcatggcacccatagtagaatcaattgcctggtagtacataccaaccatagtacctgatatgcaggccagcaccccgctgcatataaacgtaaaggatataactccgtttatattcacacccatcaatttggctgcctccatattttgacttgtactgagcatagcctttcccaactttgttttatacacaatcagtgacaaaactgtcatgagaatgaaagctactgccaatataatgacctgtgtccagctcactactgcatttcctatataaaatcgccccaaatccagtttgtttggaaaagatttcgtctcacttccgaaaaacagcatgacaaaattatccatgatcattgacatacccagagtggtgattaaagccgaaagattaggcgcatgctttttcctcaggtaccgcagcgcaaaccgctccagacaatatcctgctgttccggtcagaatcaagctcagcaagaatgccaccacaaagttaccagtcagaaggtagagcataagggacagataagctcccagcatgtacagcgaaccattggcaaagttggtcagtttgatcacaccgaataccattgaaaatccaatggctaccagagcatatgtactgccaattgtcagtccatttatcaattgctgcaaaaacatactcttctcctatccgccaaaggctattggtctactctcacaaagtccccgtcttttaactcgtacacataaataccctttatcatttctttgctttcattaaatgccatgttgtaaccagataccccattgaattcccggatggaggcaatctcctggcgcagcgcttcgctgtcagtccccacctttttgatacagtctaacagaatattggtagtatcaaatgcctgggcagcaaatccgtccggaacctctccatatttttccttgaaagcagtgataaatgtcctggtcttatcgtccagtccttctgtatcttctacattatctgaaaaataaggtatgctgctgagtattaaagctccatccgctttatctcccacaatatccaacagttcctttttaaggcacattcccggccccacaagctgtgcgctgatatcaaggcttttcgcctggataaatatttgagaagcttcattataagccgcacttgcatatataatttcagctcctttatttttcacatttgataatataggtgtgaagtccttggtagaacctgtaataaaggcctctttagcaaccacctctcctcccaggttttcccactcatttgcaaataaatctgttgccagaactccctggtccgtattctgatagatgatagccagcttcttaccgcctgtaatcttatataattccttggcaaattcagaaccttcatatttctggctcatgacacaggaaaacataaactctcccatgcccggaaaatccgtatgcgatgctgccggacttaccagcaacagcttgtttgattcaaaaataggtactgctgccatggcgcaggaggatgcatagcttcctaagcctgctatcactgatgagtcggacacgattttattggctacatttacggcttctgtcgcatcccctttatcatcattgaattccgtaatataatcagttccattttccttattaaacaattccaccgcaagctcagagcccctcataagcatctctccatactgcatattatcccctgtcagcggaaagaaataggccagtttattcttgccggcagtatctcctcctgaatccgcaccggttccttcctggacatcatttcccgtttttccaccagcactggttaccgcatccgaggtccccgctccctgattctggctgcatccggctaaaatagctccaccgcagcagaccacacttaacatcaacgccagcatccttctcttcaacatcataatcctccttcatctcttttatcatgatttaaatatctgttccaacgctttgtacatcgcctctgccggtggcagctccccagaccacatctgagcggccaaggccccctgatacacaagcatactaagtccatcaaaggtcaatgctcccttttctttagccttttttagaaataatgtttctgccgggtttgtaataatatcctgtacaatcatcccttcctttatattctcataacagatatcaggacaccccgaatccggatacagccctgaattcgtagcatttattaatatatcgcaatccggaatttggagccccggcacccatttgataaatgaagacttgcagcaatccatattccggataactctgcagagctcctttcccggctcctcttttctagccgctactgtcagttcctttgcaccggccagggcacactcaaccgcaatcgctctggccgcgccgcctgcccctaacaggacaatacgtttcccctccagggacacccccctcttttccattccaatgacgaatcctttaccatccgtattatcccctatcagttctccatctctgttaatcaccgtatttatggcacctatgagtcttgcgctttccgacaggcggtccatataagccaccgctgcaatcttgtggggtatggtcagattcaccccttcgaatcctaatgcccggattccctccagggcagctttcaaattttcaggcttaacctccatcagctgataacgccatggtattcctaaagctttatatcctgcctcatacatttccggtgacggattctcatcaatggggtatcccagggctcctgtcagtctctgtctgaaacatgttttcatatgcataatcctccaaacaaggtcatatttatttagcaaagttaagtgatgcacgttttaatactctaaaatgatttgcgtttaatcatctgcattttaagctgatactctttataatcagtcccgccatttttaatcctcccaactaaaagctctgcagccagatggcacatttcatccacaggatgacgcaataccgtcaatggagggttggtaatttccgtccaggcattgtctccaatcccgactaaagcgagttcttccggaaccttaatttgatgctccataagacacttcatcactccgatctgcatattgccattacagattaaaagagcggtcatagtgcggtcttttatcagcctctctgtctcctcataagcgatgacagcatctgactccccttctttgattaattccgaatctatctcaagaccatgttccttcagcgcccgtatgtatccccggagacggtcctcggtatttgaaatgcctgactgtccttttaaaattccgattctcttatgccctgcctttatcatctggcttacagcatcatagactgcctcttcattattaccagtcacgcaatccgcttccagaccatcggctttccggtcaatcagaacaatgggcaccctccgtttggttccgttcagataggaatgatctcctggtgctggaaacattatgacgccatccacctgttcctggaagaagaggtccatttgttccttttcagtggatacattttcataggaatatccaagtatgacctggtaccccttctcactgagtacttcattgatatcgctgataatatccacagaaaagtagttggagatattgggaaccagcagcccaatctttttactctcattgcttctcaggctctttgcaagattattaggaatatatcccaattcatctgcagccttttttaccctgtccactatctcactggagacatatcttgtattgttaaatacatgtgagacagttgcagtagatactccggcgctgtgcgctacatctttaatcgtcgctttcatattctactccccttttttggttaatcgattacgtaatcgtttaacttgattaaatcatattttgtactatttgtcaataataatgtgataatgctttttaaatattgcatattatttgtttttttatctccccctcctattcttttgagcaattattttaattttttcatattttaatttatttttctaatatttttgcacacatcttttctccctgcttttcaaaaaattgtatttgttctaacccctatttcctgcatatcattaacagcttcaacaaaatgaagtgtatatccccatctcacttttaacatattcttgtattgacctcccaaatcatgctattatttaaacagcacacacaagaggtaaaaccatgaaaccaatattcaaaagcagcctgatcaaagacgttgttatcagctatgtctgtatgattgtcttccccgtcatgattatcttaggcatggtgtttttgttggcgggaagatacatctaccgcgccgctacggagtccgtgaccgtgacccagcaggcagtgctggaattatacaaagaagagacccgcggctcggccctggccctgtctcgggtggtcaatatgaacggggacaccaccatacaggatgcgtcaggttatgatacacaaagacaggaacaggccatggagcagctatataccatgtatcagatgctggccgcacctgagtataaaattctggacatccatatttaccgcaaagacggcactgccatcatccccaagggtgagatgcgctacagcgtggaggaactccgccaaaaggaatggtatcagacggctctcagacagcccggtctggtccacacctccctggtggaagaggactatttttaccgcatccgttcttcccaggaaattctggagatatccgcctatgctcccagagaggatacggaagctgagtgcattgtcctgtaccgggtttcgaagataccggatgccattaaaaactataacaaaaacggaaggatgggaaccatctgtctcatcaacagccagggaagcattgtggctgaccccggccagaagacccggcttccgtctgctgtcaccgaaaaaatccgtcaaaccacagcagacctggctgcctcaggccagccggcagccggcaatcctcctgcttcaactaaccattttgccgccagcacccagcagcagatttcataccgcggcatacgctatatgattctgccgctgcccgaacccggatattatctggtcagcgcggtcaatgagacttccctgttcgggcagtttaccctgttctcacttatcagtatggcggtcatcctgtgcgtggtgctgatgttcattttctatttcaaatggtacatgaaccggctgctgattccgctgggccatctgacagagggcatgaggcaggtagagcaccgcaacctggacacccgggtggaaatgtgcaggcagcaggacatcgcccggatgatttccaccttcaacaacatggtggagcagattaaggagctgattcatgacaaggagcaggtggaaaaggaaaaataccaggaggaactccataccctccagtcccagatgaatccccattttctcatgaacacgctgaataccttaaaatttatggctatctccgcccactataccggcatgcaggatatggtggtggctctggagaatatccttgcggcggtgttaaaccgggacgggggcttctatacagtcagggatgaacagtctgtgttggagagctatatctatatcatgcagttccgctacatggacagctttgaggtggacataaatttaagtcccgggattctggactgcaaagttcccaagctgattctgcagcccattgttgagaactgcatcacccacggttttgacaacctgggggaccgcctgggaaggataaccgtcaaaggaaccattcaggaaggaagcctggtctttgagattacagacaacggcaaaggtatggatcaggacaccatccagcaaattcttggaaatccgctggctccgggacatcccgaatacatggcaaaaccggaaagcatggacactccgggctctttgaaaagccccgaatcactcccctgcgcagaggctgccagccgcccggaacccacacaccgccgtaccatcggcgtgagcaacacggacaggcgcctgaagcttaatttcggccccctgtacggtgtctctattgactcaaagccaggagtctataccagggtcacgctgaccctgcctgtcataacaaatacaacagaggacgaataaagcaaaggatgagggccatgtacacagtattgatagctgatgatgaagcaattgtaaggatgatgctgagttccatgattgactgggatgagatggagctcaaactggctggctgcgtatctaacggccgtgaggccctggcctatctggagcagcatccggtggatatcctgattacggatatccagatgccggtgatagacggcctggagctgatacgccggataaaggaattccatacccagccggaaatcctggttctcagcgcatacaatgatttcccctatgttcgccaggcctttaaactgggaatctatgattactgcctgaaacgggaaatccatgaggaaatgctgaaacggcatctgaccaacatgaagcagcttctgtcgcaaaagggcaggactcagacttcaggcgccgaacatgtgaaagacaggaaacagctgctggcccagctgctgtgcggggagcttgagccggaggcagcagggcttcctgagcgatattatatggtctatttctcaatccagaggtatcaggaaatcaggagaaattttggaaacgattttgacaaaaactttcatgtctccctgcttaacctggccggccagatttcacaggttgcaaaccacggcgttatcgtgccggaccatgtgaccaatctggttatggtctatgagacaggcccccaggacaaccaggaccaggccctggaaggcctcttgcgtgtctgccggcgtctgctcaatgcctggaagaactacatgaacgtggatgcatccgcagcagtgagcagcctggcccttgggccttctgcctttgaggagaagttagcagaagccaccatgaacctgaccatgaaatacgtcatgaaatcccagaacctgttttcttcccttgactattcccgcttttctcccctggaagcaatggcccgggagaatgaattccgtgaaatcatccaggccctaaaatccaataacacagtgagcttcgagtctgcccgctcccttcttttggcgcgcatacaggaatcccctgtacggcaggcaggccttctggccctctatctggcctatcatattgctgcctccctggtccaccagctggaggatacggactatgtatacagcaccagtcttctggaagaaatatccggcctaaagaccagccaggaagtgtgtatatggaccgtaaattttctcagcgacatgaaacgctacgtacagttccactatcagttcgatttcccggacgagatatcccgggccattaattatatcgacagccactactataaacccgatctaacgctctatgaagtggcatcggaagcaggcttcagcgaaaaatatttcagcacgcttttcagccgcaaaatgggtatgtccttttccagctatatgaaacatctgcgcatacaccacgccaagaccatgctaaaagaaaccagcatgaagcttaaggaaataagcgaggcagtgggctacaacagcgtggaatacttcgtgcgggtattttccgcccaggagggggtgagtccatcctcctaccggaaacagagccgtaccattgtacagtgaatcgaaccttttttcattgttttcatccatcagaattgttacactgaatctgacaaaagcaatcacaaaggaggaagctatgagaaagaaaagatttttgttaggcgcagtggctcttacggctgccctggcagccacgggttgcagcggcacccccaacggttcccaggcagcggacagcgcaaagaatcaggcagacacgggtaaggattccggcagtgcagattccggcagcagggactccggcagtgaggacaccagcaaagccgccggggcagacaggaacatctcctgtaccctgaccctggccacctgggacgtggcggctgccaaaacctttgaggaactggacatggaaggacggttccaggagctctatccaaatgtggaaatcgacatcgaagagttcaatgcggaaccggagtattttaattccatgaaaatccgctcctctgcatctgagcttcctgaccttatgttccataaatccgacagcatgaaccagtactccgagtacctggcagacctgacggatacagaagccaataaaaataaccagattgcctctgagtatgcggtggacggcaaggtcctgggcataccggaccgcaaggcaagtgattatgtgtattactggacagacatgtttgatgaggcaggagttgaggttcctgaaacctgggatgagttcgtggaggccagcgaaaagctccaggaacatttcggtccccaggaccctgacttcggcgcaatctgcatgggcgcaaaggatgcatggcccacttatcccctgatggagtatggtcctgccgcacagagcggaaacggttattactgggatgccatgacaaccgaggacgcgccctttgcagagggtacggatatccacacggtttacggcaagatttacgacctgttccagaagggcgtgctgggaaaagatcctctgggtatcacatacgaccagagccgcgctctctttgcaaagaaaaaaggggccatgaccctaaacagccccatgttcctcaccgcatataaggctgacggctacgacactgccggtatgtccaccttctacctgccatttcgtgacagcagccaggatgaattcaaccttgtgacccagggcgactgcttcttaacggtcaccaacaattctgaaaaccccgaggtagccaaagcattcttagaattctacttcagcgaggcctggtatccggattatattgcctccatcagcagcgacagcaccatgactccctatgccaaggagctggatcctgtgcttcagactgcatccgaacttcagcccgaggttaaattcgtgacctatggggccggcggcagcgactttatcaacatggtatccgagaccaagtttgactgcaaacagctgggcgtggagatgctgacagacggctttgattatgcaaagcgctgtgaagagctgaaccagacctgggcggaagcaagaaccaaactgggccttaaataggaggacaggcatgaacaggctcaaccgaaaaagacttacctttttaagcctgtccctggcagttccggtcattctgttatgtgtatttgtggtttatccattctgggagctcatccatatgagcttcctggaatgggacggagtttcctcggtacggtcccttgcagggtttgacaattacacacagctctttttcaaatccccggaattctggcaggctttccgcaacaatttaacgtatcttctcatacatggaatcatgatgcctgtggagctggttctggcagttatgctctccagcaggtttaaagggtccggttttgtcaaggccatcatttttctcccttttatcatcaacggcgtgggtatctcctactccttttcctactttttctcgcctgtggaaggcggattcaactatatcctgaccaggctgggtatggaaggcctgattcataactggctgtccgaccccaaaatcgtgaattatgtgctggcctccgtgtccatctggcggtatatgggctttcacattgtcctgttcatggccggcctttcctcggtgccaaaggatatgatggaggctgccgtggtagacggcgccaatgcatggcagcgcctgagatacatccagcttccggccatccgtaccgtcattgacttcatgctctttgatgttatcaacggcagcctgcagatgtttgatattccttacatcatgaccgctggcgggccaaacggggcgtccaacacattttccatctacaccattgacacggcctttaaatacaataacttcggaatggcatcctccatggctgtcatcatgatattcatgattgtatgtgtacagattgcccagcgcttcataaccaaccgtctgagaaggagggatcagcatggcgcgtaaaaaaatatccctggcagggaaatatgctgtttctctcatcctggttctcatggtattcctgccccttctggtgaccatcataagctccctgaagattccgggaagcctggacgcccagtccccgctgtggatttcagccagggacatgacccttaacaactacctgagcgtattcaaggagcggtaccttgtcagggcctttaccaacaccatcaagattgttgccgtcagcattttcttcaatgtcctggtgggctcaatcactgcctattgcctggaacgctttgagttccgctttaagaaaatcatctatatcctgttttacctggccatgatggtccccaccaatatcgtggagattgccagattccaggttatccggggcatggggctctacaatacattaggcgcccccatcgtcatatacattgcagccaacctgatgcagctctatatttaccggcagtttataagcggcatatcagtttcactggatgaaagcgccatgctggacggctgcggttatttcaggatattcgcccagattatctttccgctgctgacaccggccacggccacccttgtcattatcaagaccgtgtccattgtaaacgacatgtacattccctatctgtacatgcccaaaaaccagaacaagaccctgaccaccttcctgatgcgctatgcgggcgcacagcagaattcctggcctctgcttgccgccggaatcatcgtggtggcccttcccaccgtgcttctgtatgtctttttccagaggtacatcatagaaggaatcacggcaggcgccgttaaagaataaaaggagatgaattatggacaaacctgttttatggaacctgaactggaaattttacgactattttgaggaaaacctcctgacagaggattctgaccgctgctcagatgtgaacctgccccatacagtaaaggagctccccttaagctacttcagccaccaggagacagccatgataagcacctatgtgaaactgctctccgtcacctcccggatgctggagaacagaatcatacttgtatttgacggcgtcatgacctattttgagctctttgtcaatggccagagggcaggtgagcacaagggcggctactcaaaaagcatgtttgacattaccggtctatgcaaggaaggcccaaaccggatagtactgcgggtggacagccatgagcgggaggacatcccaccctttggatacgtcattgattatatgacctacggcggcatttacagggatgtctggctttactgctgcagccaggtctttgtggaacgcgccttaatccgctatgacctggagaacaaaaatgccatcctgaagcctgaactgttcctggataacagcggccctgaatgctccctgacagcggatatctgcctgaaggacaaagagggcgccattgtggcttcctacaaaagatgcatccaggccgccccgggcaaaagcagtattatcttagagccacaatgcgtcccgtcccccattctgtgggatccggacaacccttacctctacacggtggatataacccttgaatcgggcggacgcgtgctggacaggcaccatgtgagaacgggtttccgtacagtagcctgcacaccggagggcctcttcattaacaacaggaaaatcaagataatgggcctgaaccgccaccagtccttcccctatgtgggctatgccatgggcaggcgggcacaggaaaaggatgcggacatcctgaagaattacctcaatgccaacacggtccgcacttcccactatatgcagtccgagtatttcctggaccgctgcgatgagattgggcttctggtgttctcagagataccgggctggggccacataggcggggaagaatttaaaaaggtgatgatgcaggatgtggagtccatgattctgacccagtacaaccacccgggtatcttcatctggagcatacatatcaatgagtccctggatgacgacgaactgtataccagggccaacgccctggcccataagctggattcctcacggcccaccacaggcgtgcgctacatcaccaacagccatcttttggaggacgtgtactccttaaatgattttacctactcagactgcaatccggacggcacaaagctgttcaagggccgcagggcggccacgggcctggaataccctgtgccctttatgattaccgaattctccgggacggcatttcccaccaagctctgggacagtgcggacaaacgcaccacccacgccagggcctatgccagggtatacagtcactccaacctgtcaaaggaccttctgggaatcatcggctggtgcgcctttgactacaatacacatgcggattacggttcaggcgataagatctgttaccacggcgtcatggacatgttccgcattccaaaatacgctgcctatgtgctgcgcagccagaagaacccggaacaggaaatcgtgatggagcccaccacggaattttccaggggtgataataagggcaaccggctggtgtccccgtttatggtccttaccaactgtgattacatcgaagtggaaatgtatggtaagcccccggtccgctattacccggataaccggtatataggcctggaacatccgcccattgaaatcgaggaggaaatcggcgtgtggcaggatttgtggcaggacggatccatcaccgggtattacaaaggcaaggctgtcatccaaaagaaattccttcgcgactccagcctccacgatatggaggtcactgctgacgacaccaggctttatggggattatacagatgccacccgtgtggtatgcagggttacggaccgtgtttccactaccctggtgtatttccccggcatcatccaggtggaaaacaatggcccaatccaggtaatcggcccctcagccattcctgtaaggggcggctacgctgctttctgggttaagacaaatccccagagcttctcaggaaatgctgaaacagcagaagttcacatccggctgacagacacgacggtagagaagaaatgtgtgaaaatagatgtggtaaaatctgatatggaggtgggttaagatatcatgaccgtttaagatatcttagcagttaagatatgtcaggcccgcatgaacactgttttatataccgtgttcatgcgggcctggttttttctggttttctgttgcttttccttattattaattatgtcccccgcagctgtggccgtgtccatggcagttatgctcgccgccctcatggtgatggctgcacatggtattcggatcataatccaggctgccgtttaacagggcctccactgcctggtccgcatccccggacgcgcccggatacagttcaattcctgcctgggacagggctgtcctggcgccgccgccgattcctccgcatatcagcacctttactcccaaatttttcaaaaatacagccagagcttcatggccgcttccgccggttcccactacctgagaggacaggattttcttatcctctgtgtcatataccttgaactcctctgtatggccaaaatgctggaatacctgtccgttttcatatgttacagcaatcttcattacaatctcctcctggtttgttattacagcggcgtctgcggcacccgcgtttttcgcagttcttcccgcagcagtttcctccgtccggacacagctggtagttgcctccccggatttccagcctttttccattgaccagacagtccgccagctttttcctggctgaattatacactgcctggaccgtggtcctggccacccccatctggtctgcgcactgttcctgggtgcagtccagccagtcaatgagccgtatggtctcatattcctccaatgtcagctccaccgcactatccatctcctggttcaaaggaccaaaggtgtctatggctggcacggaacagattcttctggctttgtacggtcgcgccatatgccttctccttctccgctgtctcactttgtttttgacttatgtcaataattatagggcagtttatgacatatgtcaatatcttttttacctttcggtcccatctgaccgtccaaactaacagggccgtcccctgcctcataacaatgtatgcagaaaacggccctgtcattattatttctttgtgcctcaaccgatatttccgtcttatgaataagacggcagaaagacctgtcccatattgcctgtcagatgccccagccccaagctggtaaccatggcctgttcaattcccgccatctgaccggaatccagatgtcctatgtattccttcaaacggttccggtctatggtgcgaatctgttctgccagtacggtggaatcctgctttaaaccgccgcgcatcctgcggatacagacatgggtgggaatggctgccttggtggagcggctggtgatggctgccacgattacggttgggctgtatttgttccccacatcattctggatgaccagtaccggccggattcccccctgctcagaccccactaccggcgacaggtccgcataatataaatcccctctcagaatggtctggtgtgcgtcctggttcatatttttgttctctctatacatatcattacctcgctgattcgtaaatggtgttttctaatagagagtatcaccatccctgaggtaattaatcatatgagggacaaccttttttcacccacaaggtttcttataaaaacagcacatatgctgtcatcagtataagccctgcccccagcatcatgaacccgtatcccatgctggaataaatcatgtgcagaagccttacatcctgggcctgcctgaaaaaccggctggactcccccggtgccaccacctggttcttttccggccttttcataaacaggggaagagggccttcgcagatcccgttgacgcatctggccagcacggctcccaaaaagggcagcacggcaagtaccagggggcggtaaacccggtcctccaggttcagccatgccggccatctgtccacatagaccctggtcccgtcctcccctgtctccataaggtatctgcggatgaacagcacatacaccagaattcctatcgttatgctgatacaggctcccctgagattggcctctgaaaaatactccacctggtgcgggacctgtgccccccttaaaaacggacggctgatatctgccatacggtccataatccggtggggggccatccccataagagggaggagacaagcagagccgcccagggcaaagcaggcagccgtgccggcgtaccgcttttccctgtcatccctctcccggcccattggggccttttccagaaaaatggccgcaaacagctttgccatgtaggcaaccgtaagccctcccgccaggaggaaggcccactccagcacctgaaagggcagggcatcggcgccctgggcgcccagcacttctatatactccactatactctcatgaagcagcgtcttactcacatacccgttccacagcgggataccgcatatgccatatgcacccatggcaaagaccagcatcaaaaacggcttgttcctgccatatccccgaatctcattcagatccagcttatgcagattcatatagatacatccagccgccatgaacagcaccagcttaatcatggagtggttcaccatatgcagcacggttccgctcacagccagcccgttttcctctcccagcagacactgcatggcgcatcccgtaaggatgaagccaatctgagacatggaggaacacgccagggtacgttttaggtcaatggagaacacggccagtattgctcccagcaccatggtcacggctcccggcaccaaaagcaccattccccaggccatgtcatgccggaacatggtcacggtaactgccaggattccgaacacgcccgtcttggtcaggatgcctgacagcagggcgctggcaggcgccggcgccacagggtgggcattgggaagccatacgtgcagcggatacatccctgcctttgccccgaatccggcaagcagcagcgctcctgccagatacaggggccatgttccccctgtggccttcctgaactgttccagactgtccatggatagatttcctgttcccgctgcaatcataaagataccgaacagcgcgcacagcccccctataactgcaatggccaggtaggtcctggctgcccttcccgctgcctctgtctcctcctgtatgaccatcacaaaggaggtaagtcccattatctcaaagaacaggaacagggagaacaggctgtcggacagaaatacgcccatggttgccccgcaggttaacagggaaaagaaacagtatcttccgcgattgccgtgtcgggcaaaatattccatggaaaacagggtggtcatcatccacataaaggctgcaatggtactgtagagccacctgaatccgtccgccctcagccatatgcccatctcacaaaatccggcccaggaaaaagctgccggactgttaacgggataaaggcagagcatgcctgtaaattccatgaccatggcggccgacgcaaaaacatcccggttcctctcccctttttttcctgccaaaagactgataaaggctgccagaaaaggccaggccacagcccacaacagccatatatttccttccatttccgctacccccttcatcttttatccttcctacatacctcctgccgcaatccggttaaacacctgaatcagagggccggaccacaggcccaggaccatgctcatggcagtaatggcaatcagaggaagcttcatattccagtttgggtcacaatgagtattccaatgggaatcctccctcccctctgccgggaaccaggcggcccctatgatgagtaccatataaaacaaagtaaaaaaggcggatataatcaggcatgccacccccagcattcccagaccccctgcctctgcggcagccgacccaagcataaacttgctcacaaagcccgcaaagagcgggacccccaccagccccagcccggccagggtaaaacaggtcatggtaaccggcatggcccttcccactccccgcagttcatacacatattcccgtccccctttatacaggatggctcccgcgcagaagaacagggtaatcttcatcagggcgtggcataccatatgggtcaggcctgctgccagtcccgcgggagtcataagcatgactcccataaggatataggacagctggctcacagtggagtaggccagcctgcgcttcagatgctgggtgcaaagggccctgagggaaccataaaggatggtaatgcagcagacgcacagaaccgctgcctgcacctttgtccctataaggaatcctgccccgaagcaccagtacaccacccgcatcagcgcaaacacgccccccttcaccactgccaccgcgtgcagaagggctgatacgggagtgggagccaccgacgcagcgggaagccagctgtgaaacgggaccactgctgcctttaccccaaacccgaagaaagccagaataaatgcgccgtacagatgacgccgttcctcatgggacagaccttggggtatcacaccgccccaggtaaagtccagggtggttccatattcatgaaggctgatgatgctgacaaataccatggcagcccccgccatggaaagaagcagatacttcttgcccgcatagatggccctggtatccatggcatgcatgaccagcggcagggtagcaagggtcataagctcatagaaaaaatacagggtaatcaggctgtgtgacagcgccactcccgccaccaccccatatgtaatggaaaaatatccgaaaaacttgttttccttcccctcatgcttcatatattcaaaggaatacagtgcggtaaggggccaaagcactgcaatgagacaggcaaatacccctgacagaccgtccagtcccagcgatatattcattctgctgccaaaacggtacagcaccagcggctgtccgggacggtttaacaccagggccccaatcactgccgaggcagccagaattcctcccattaccagtatctcccgttttctgcgctcctttggacgcagtccaagcacagccgcgccagtcaccatgggaagaagcacaggcaccagcagataatatggattcacacccatcccccctttcacaccatatcagaggcaatgcccctcagtaattcaaaaacaggatttcccagggcccccagcaccagcagggaaatgcctaacacggccagaggcacccccataaacgcggatacagacaatcttccatcttccgattgatccgttttccgccaatcctctcccggaaaaaatccctccacaataacaggaaacagataccccgccgtcagaagggcgctgaccataagcaccacaggccccagccatgcaaacacgccggcctctgctctcatggcacccacggccagatgccattttgccagaaaaccgcctgccgggggaatccccaccagtgacagggatgccagggcaaagcataccatcacagccggcatccgctttcccatcccccttaactcctttaccctggtgcagcccgtcttacatatcacagcccccgcgcagaggaacagggcgttctttgccagggcatggaacaccatctggagcagagaaccgtaaagcccttccatggacagcaggaatacgcccaacagcacataggacacctggctgaaggaggagcaggccagacgccttttcagcttcttttccttataggccagcatggaaccggtaaatatggtcaccacagccatggacaacagggcgtactgcacccatgtcccccgcagaaacgcgggaccggccatattgtacactacacggatgacagccaccactcctgccttggtaatcagacctgataacacagcgctggcaggagcaggcgcaaccggatgcgcgataggcagccacggatgaaggggcataagccctgccttacaggaaaatccggctgccatacagaaaacagccagaagaagaatctgcggcctgccctgggccattcccgctgcctccgccagaaccccgcccgccttaaaatccgttccgcaggcatactggcggaagaagaaatatcctcccagtgcaatggatgcgcccagcatggaataggccagatataccattccggcacgaagcgcttccctcttcctggaatggaataccaggggaacgctgaaaaatgtcatcatttcaaaaaacaggtacagggtaacaaaatttcctgcccaggcaactcctgtcaaggctcccagggacataataaggcatccgaaaaaccgggcatcttccttctcatgttccatatattcaaaggcaaagaaaaccaccagcacccatataagggatgccagaccggaaaacagggctccggttccatccagccgaaggcacagctccaagcccggtccgatgctccacaggggcagcttcatccccatgcagttcaggatgaccagccaggaacacacagcctctgccagggacagaaccgccgcggctgtgtgaattttgttttttcccggattccatatccacagggctccgccggaaaccactggaaacagcaccggcgccatcatccacatttctctcatgtcctatgtcctctccttctcatatacttccctgctgccagggtcacccgaagttggcaagccctgtctctatcatccggaccacagggccgtagcaagtcccaatcagcacattcccggccataaaacaggccatggctgccgcgaaagaaacatcctttacaggctctcccgcctctggcacagccgcgtcctccagacctgccgcctcatagtccgccttctccggccctctttctgaaaacacgatgatgatgagcggtatgtaatacatggcattgaggaccgtgctgacagccagggcccccagcaccagaaccgtccggtccagatcatgaaacgaggccatagcaaaggaaatcttggaaacaaacccggaaaaaaagggaatccctatcatggccatgcttcccaccaccagtccggcgccggctgccggattccgccttgcgcttcccctaagggccgctatctccttctgatggccgcagcagtccatgaggccgcctgcggctgtaaacagcatgggctttgtcactgcgtggacaatcatgtgcagtactgcggccgccagccctgcactggttcccatgccgattcccatgaagatatatccaatctgggcaatggatgaataggcaattacccgcttgaccatatgctgctgcagcgccttggccgaaccaatgaccatggccaggattccgaacacgaaaagcaggtcattgatccgcagccggataatcagatccattcccagaatccgcatatagactttgagaagcaggataatgtatcccttcagcaccagccccgacaaaacagagctggaagcagccgtggcattggcatgggctcccggcagccaggagctgaagggatacagggcgctctttactgccagcccggaagtcatcatcaccagagccatcttaaggggaaataaatcctttcctgatgatgccagctccctgacagcccctgccatgggttccataaggagatggcctgtctggcagtataaaagggcaatggagataaggatgagcccgcttcccaccaggctcatgatgagatagcgtatggctgccgccacggtctcgccgctttcctttgcgcacacaatggcacaggctgaaatggtattgatttctatgaatacataagcggtaaaaaggtcattggtgtagataagggccagaagggaactgaacagaagattcatcatcacatagtacaggccggcccgctccccgggtatgtcgtgttccagggaccgtttattggcagccaccgtgagaaacatcacaagggaaaagaccaggctcataagggcttccagagcgccggccctgacctcattcccccatggagccgggaaatgtcccatcatgaagcgaaaacaggtaccgtccgacgtatatcccagaagcaggcctgacatcactgccactgcccccaccaaaaccaggtgtagaatcctggcccggttcctgcttcccagaaggggcgtcacgattccccctgccatcatgatgaatatactgaaaaatggaatgttctcaaccagtctcaccatctgtctcctcctgtccttcatacagcatgccgtccaaatccagggttctgtaatagtggtggaatctctgaatcagtgaaaagagaaaggccgacacgctgacagacaccacgattcccgtcagcaccaggccgctgggaaggggattgataaatccttccacagatgtccttccatctgctatgggcgcccttccaccggctatgtaccccttggctgccaggaacagatacacggacatatccataatgttcagcccgatggcctttttaatcagatttttctggagcagcagcatggtaaacccaatggaaaacagtatcatggccgctgtctcgtagtaattggtcacaagcgcctgcattatcacacctccccttcccggaacagggaataaaagcaatacatggtcccggccaccaccaggcccacacagatatccagaggcagtatcagccctgcgctgaagatgtttcccggccttcccaaaggaatacccgactccaggtggttggcccccataaaaaaggaatagccttttgaaagggcgtataccatcagcgcgctgctgctcatcacagtaaaggtcttaaagctgaaaaaacggtgaatccgccggtgcccaaatgcattggcatatagtatcaggccggcccccatcaccgttcctcctgagaacccgcctccgggggacagatggccgttgagcaccacatagacgccaaacataagaatgaagggaaccagcagcctggccacctgttccagtatgatatccctttcctcatcctcttcatgctccgttccccctctctggtcttccctcccgctgtacccgctttcggatttacggcgcaagagggcaatgacgctgacagccgccaggaataaaaccacggactcgccaaaggtatcaaaggcccggtaatccagtatgattccggcaaccgtattcacggccccggtctcggacagcccgttttccagataacggcccaccacctcattattggccggattgtccgcggagccgaaggccggcagatgggttaccatcatgagaagcactgccatgcccgccagacagacgatctgcgccacagcccggtagacacggccgaatacacgcagggcatgttcctccgtaaattcggcaaaccgcctgcccatagtccgttttgtatttctctttacagcctgatccgaagcatgcacggtgtctgcctctccatgcacgccggcctccccgtcatgcccgctattctccccgtcatgcccgccattctccccgccatgcccgccggccccgccttcatgcacaccggcctcatcctcccagtccggaccgttttccacccagtccatgaatgcgcgcagaccgcgcttaccgctgtcctcactcactgtcttccccccttaacccatcgaccttatacagtgtaataaaaagcaggattcccgtgacccctgcgcccacggccgcctctgtgatagccaggtccggggactgcagaatcacccatatgatgctcatgataaggctgttggccataaacaggatggctgccaccaacaggttcctgcacaggaatacacttaaggaacaggccatcagaaacagcaggagaatgatctcaaccgccttcatattcagacaccccgcattcctctttaaggtttggattgctcctggcctctgccctggccaccatgtgggaggccgccgggttgccaatccagataaacagaagaatcaatccgattttggccgactccatgttccacccgttggagattataaggccggccaatataagcatgctccccagggtatcgcatttggcagccacatgaatccggttcagcgcatattcaaaccggaatatgccaaaggtcgccacacagagcacaaacactcccagtacgatgaaaattcctcctgtcaccagacccattacagcaccgcctccttttttgtatttttctttcctgccccaccgctctctcctgtttccttttcacagcccatatgccggcccagaagccctgtcagaaccacaaaggacaggaagctgataagggcatatataagacagatatccaccagataatcctcatggaacacctttatgagaagggcaatcatgagaacggtcttggttcctatcatattgatggcaatgagccggtcggaaaagcggggtcccagtacggcccgcagcaggcagaatatcatattgatgctgagtatgataaccgacagaatcaggatacctgtaaacagcccctctgccgcccccatccctgcctctatctttgcctctatctctgcccccatgtcccttcctcctatcttacttcctcgatccgcgccagctgccttgccacatgccagtccttaagcccctctgccatctcagctgtcagcgcgtggacccacagcacatcatccttcacatccaccgtgatggtgcccggcgtcagggtaatggcattggccagggccgccctggctccggcgctctttaagtccgtcttaaccggcaccagacagggtgtgatttccatgtggggggacagcactatgcggataatggccacattggccttcaccacctcccaggccaccatggccaggaatacaagaatatgacccaggcgcttcaggagaagcaggtccccggacaaacggtaacccagggccagatacccgaagccgtataccagccctgccaccgggactcccaccgccagaatttcagccgtgaccctgccgtttaacagaatccacagaagatacagcaatacatacatgttctttccatcccccttggctttccaaaccggcaaagggctgccgcctgttatagcagcagccctttcctctcatccgggagtgccggtcagcgttttacaaaatatccttctttcatgattacgtccatgttctcaacagcgattgcacggatattctctaacgggttgccgttaattactaacaggtccgcgctctttccctctgccagggagccggtcacattgtccaccttcagcatctcggcgcctgccttggtagccgccacaatggtatccatctcgctgatgcctgctttttccacaaaggagtacatctctccgatggctgttgttccgtatggtgtaaggctggagcagaaggagtccgaaccaatggtaagtccgatgccttttgcctttgcttttcttaagttagcgtacacgcggttcagctccttctccgctacggtatcgccgggatactggtcatgtacctccgggatgtatggcggagcgtatgtcttgaaccattcgtttaagaactggatggtgggacagaaataaatgcctttctctgccatgatatccagacactcgtcatttaaggtctggccgtggataatgagatgtacccctgccctggcagaatccagggcgccgccgtagccctctgcatgggaccataccgggatgcctaccatcctgcactcatccacaacagcctgaatctcctccagcgtatagtgctggtccagcttctggtcccagcgccagatgccgccgcctgtggaccagattttaattgcatccgggttctggcggagtcttcttctaactgccttgcgcagatcccatggtccgtccacacgctcagcccatggatgggattcgtcgttgtagtagctgggaagcttgtgggaatccccgtgtccgcaggtgcggcagaatccaagtccggttgccactaccctggggcccttcatgacgccggcttccaccatgttgcggatttggatgccggaacgggaaatctcgccaaccgtggtaaggccgttctccagacactcatgggcctgctgtaccgccaccactgtcttctgtaccacatcctccagtacccagtcgctgtcatcgtctgtcaggtttcctgaaaaatgcagatgggagtcaataagacccggcataatagtctttccggtaatatccacaacctcgtagtcaggtccgatttccttgtccgcaccggcgtacgcaatcttgtcatcctctgtcagcaccagactgttcaccactggctccgcgccggtaccgtcaatcagtaaaccgcctttaaaagctaccttcttcattgaaaaatcctcctttatttgatatatgttgatgtatgattttattgccgttattttgcagcggctgccgccttattatttgcctttgccctggtaacagcgctaaggcccagcccgatgaccagccatgcaaccacgatggcccactctacaggcttaagggctgcggggctgaagggaaccaccataagcccgatgatgatggtacctgccagacatgccatgcagatgcctgcttttccgccgggaaccttgtaaggccttggaaggtcaggctccgtatagcgcatcttaaggcaggcaaagcttaccatggtgcaggagaagatgaatgccagcgccgacacattggtcagggataccagcatgttctttcccaggaaaggacccataatggtcaggactgccagcactgtgttggccatcttgggcgccccgcttttttcatccaggaccgcaaagctgtccgggagctgtcctttacgtcccatggccagcatgatgcggctggtagctccgtagaaggaattcatggggcccatgggtcctaatgtggcgattatcagcattgccacatacagaaacatgttgatgttcttaagacaggccaatgccggaaccgtgctctttataaaatcagtccacggtatgatggtgccgaaggaataaatacaaatcatatagaaaccgccagccgccagaagtgccatactgataaccttgccgaacttgttccagtccagaccttccgccgcttcctcagcctgctgcggtatggtatcaaaccctgcgtagaagaacggggtcattaccagcactgagataatgcctgcaaacatgttgtttgcgctggttaccgtggatggtccctccacctgcgtaaaggagggaaggatgttggacggcccgcctttcacgaaggagatagccattgccaggagcatgcccgccaatagggcctttgtcagaaatgcctgcagcttagcggccgcgctggcgccccggaagttaaggagaatcacatagactgcaaatcccagcgctatgacagtggggaacaggtacacatccgcccccatgatggtatagagcttaaccgccctgagaaccgggaacaggcccccgaacatatcggatactaatgtggagatggcgatggcctcccacgggcagaggataccgttgcccagcgccaggaaccatcctgttatgtatgagacattccgcccgtaggtcctgtccacatattcaatgattccgccggagatagggatggccgctgtcagctccccgaacacggcacctatgggaagcaggaacacggctccgatggcaaatgcaatcatggccgctatgggtccgcctccaatcaccatccagtcacctaccagcagcacccagccagtaccgatgatggccccgaatccaatggtaaagaaattccatatggacagggtctttttcattccgcctgcatcatttccacttggtccagacataagatctgtttccccctttttcttgttttttatattgtttctcaactcatatcctcattttacacaaggaaaaaattaacgcaatactttgtgcacaaacgataatttcagtgtaataattggtcagaaatgtattttttgtccaaaaaacctatttacaataccactgaaagaattgtataatcgttatgcgtttaactaatttcaggggagaatggtcatgttcagaattgtactttgcgatgacagtcccgcggacctgatggtgctgtgcggacatctggaacaattaaaagaaaaacggcctgtggatatcatatcctacacagacggcctggacctgcttaaggattataaacaaaaagggttctgcgacatcctggtgttagacatgcgcatggaaaccatgggcggcatcgaggtggcaaagcacatccgccagctggacgacgaggttcccatcctcattgtgacagccactgtggattacgcggtggagggctacaaggtgggcgccttccgctatatcgtaaagccggtggagagcggcgactttctgtccgccgtggaggagctgcttgacaggcagcagaaaaaacaggcatccatcttttcctttcccagcataaacggcaccaccaaactgatgaccgaccatatctattatctggaatcggatttaaggaccatccgtgtggttgcaaaggaaggcacatttacatttacaggcaccatcagttccctggaagagcagctccgcccggacggcttcatccggattcacaagagcttcctggtcaacgtaagccatatttataatatattcaaggattccgtaaccatggacaacaaagaggtgcttcccatgagcaagcacaagcgcagggaagtgaaccaggaattcttaagctatatggaggcaaatctatgatgaaattcccagcctgcatggaggcagacctatgatgaacgtcattcagcatgcctggatcagctttgtgctgtccgtggccgagaccctgattctttattggctgtgcagcaactttcttcaccggaacctgcggcctatgtcccagtacacggtgggcatcctgatttattttatattccagtgggtaacctactggttcaacgcgcctctgttcagcatgtgcgttttttactgcgccttcacaatgctggtaagctgcatattctttacggattccctcaggaccaaggtgctggttgcttatctgttcgttgtcctcaactatgcctgcaagctgctgtccgcagtgctgttgcgttttatgcacaacgagccccttccctcagagcccaatttcctgattcagagccccctggcccagatgacggcctgcatcctttttttcttcttcaccctcttgttcatcctgtgcagaaacatgagaaagagcaacaaagctaccctttacaatgccatttccttcctggtcccctccgtgatcctgttcattaccatccagattttccacatgaggaacagcgtatcccacttttacctggagatatcgggaatccttttctgctcctccatgttcctgttctatctggtggacgattatgccattatcaacgaggaaagccagaaaaatatgattgcggacaaactccttaccatgcagtcctcctactatcagaaggtggaggactcccagagggaaatcacctccctgcgccacgatttaaaaaaacacctccattccctggtggtgtttttaaaagcaggccagtatgaggaggcccttacatacattgaacaaatctatgaatccgccaacggcatgaaggtgcccctaaccggcggaaacagcatggtcaacatcctggtcaacaatgcccagcagcaggccgctgcctgctgcgttcccctgacagccaacatcatggtgcctcctgaactgccgtttgagaacgtggacctgtgcatcatcctgggcaatctcctggacaatgccctggaggcatgctgccgtatgggaaagggagccaaccggttcatccacacggaaatccgctgccagaaggcattcctgatcatcagcatctccaattcctacaatggccagctgcgcatagaaggcaaccggtacgaaagcatcaagattggagagcagtactgcggcatagggctgtccaacgtatccacggtcatccataaatataacggcgacatgaaaatcagccacaataacgacgtattcacggtatccgtcatgctgcctctggtttgcaggtaaacgcctgctgccgcctgcctctggtccgcataagcgcctgccgatgcctgcctctggtccgcataagcgcctgctaccccttcctgccagccgcttcctccacaggcagcatcagccggaactcggctccatgacagggcggacgcctgttgcgggcttggacccgtcctcccatgtactccatggcagcgcgcgtgatggaaagcccgattccaaaattccctttattgcccttataaaaccgctcaaacagatggggaatctctttttcatccaggccgggcccatcgtcctttacacagacaacagcccattccccctcccttttaagagagactgtgacactgctttttgcatatctggcgcagttgttcaccacattctgaaacgcttttccaagcagggacgggtctgcactgaccctgatatcctcctgctccttttccatcccaatgctcaccttctccgctatccctaacccctgtaaaatgtcaatctgcgcctctataaactccccaaggcttatgacctctgtgcgcagccttgtgtcatggctgtccagcctggatatggtcagtatgccgtccaccagctccttcatcctcatggtttcagacagaatcacagcggctgcctgggcatggtccgggaacacattgcactgaattccctgggcataaccgcagatggacataagcggggtccgaagctcatgggatgcattctggaaaaaggccagctgtttttgttcggtccggtccagctctgccgccatgccgttcattgcattctttaaatcttctatttccgagatcggataatgaacccgggacggctcaaattcccctttgcctatggcgccggcctgcctgcacagccccttaagctgcccggatatgctgcctgccacaaaccaggcagcaaccagggacagaaatgccagaacaccggcaatggcagcaagaagccctcccgtgtaggacagaagggcttttgtgtcgggtatctccacatatcccaccagatattttccccttatattgccggagctctctgtctcatagagccggaacatgtactgccgctttcccacagcagccgtgacatccgcccctttattttcctcaaacatcccgccggcaatcatctcacggcatgccccgctgatttcctctccttcccattcctcctccccctgcctgggaaaggtaagcttcagccgggaattaaaggcaatgagactggcttccgggcgtccctttcgtatatactccctgacctggctcagaaattccctggaatacatcttctcctcatccctggtcagagtttcgtttccatcccgcggatacacctgctccgccatggactggacggattccatcagatgctctaagctctggctggatatccgctttacgtaccagcctgaggcagaggaaaacagtgcccaggaaaggacaggaaacaacacaatcaggattaccacaggaacaaagatgcgtgaacgaatggcagacaccatgaccgctcccccctgtcttcctccagcctgaatccatagccccatacggtttcaatggctgccctgcacccggcctccctgaatttgcgcctgaggcgttttaccagatcatccgccaccctggtatccaaatcgtaatccggcagctcccacacttccttcaaaagcacctgcttggagaccgcctcccccctgcgctccatcagatactgcaggaaagcaaattccgtgggtgtcacggaaaagtgggcgccgtccacggtcatgcagcgggagcgcgggtccaggcttaaattagcgcagaccagcgtctcccctgcatcctgccggatgtatccggccctgcgaaacagcgccttgaccctggctaccagctccagaggaagaaagggcttaaccatatagtcatcgctgccaagggtgatgcccgtgacccgatccatgggagcgtccttggctgacacgatgataatgggaacccggctctccctgcggatcgccgtacacagggcaaagccgtccattccaggcatcatgatatccagaatgatcaggtccggacaggatgcatggaatgcctcaaacaggctctttccatcctcaaatgtctccacctcatatccctcgttgacaaggaatgtctgtatcaaagtgcggatatgcagttcatcatccgccacatatatgcgtttcgccataataacctccctgcatgtaacagtatttacggatagcataccatcccgtcaggaatccgtaaaccgctgccacatttttgccgcatttttaacctgtatccgccctgtgcatctgtgctatcctgttggtgtggacggcggataccggtaccgctgttccgtattatcccggacatattccggactgacaatcacagccacagaaaggagttttcattcatgaaaaaaataacagtctttatatgcgctgcagccctggcctgctccatgagcttccctgcctttgcagcccagacaaaaaaggagtataacaccgaaacagcccaggtccgccaggaactggccgacacatctgcctccatcaaaaatctccagaagagcagccgcactgcctccgatgcagccaagacagtccgccagggctggaaggacagcggccagttaaaggaacacaaggatacatggaaccaggtcagggaattaaaggatgatatcacagaagtgcaggtgtcctatacggaagccagcggccaggccaggctgttgaaggcccaggcaaaaaacgatgtgaaggatggaaagtatgacgaggccatggccaaactgaaccagtgcctggaacagaagaaaaaagccctgagctccatggaacagataaatggaatctgggcgcagattgacagtctgttaaaataacaaataaggcattgtccgtccctccggggttacggcaatgcctttcttttggccggatcattccttcactgcagttccctgcagatcttcctgtacgtatccgcgtatatgcttcccttattccatataaaggcaaagtcatgttccatctggaaatccctcagctccagttccctgaacacgccctcccttatcccctcctccaccgcggtccggtacaggaaggtgattcccgcatccttttccagcagctggagaatgacatgcatacttccgatttccgtaatgtgggcaaaatcagacaggcggatattcttgatgtccagattcttctccaggatatccctggttcccgacccaggctcccgtatgagcagatgttcctccaaaaggtcccttaactggaccggctccccggcaaatacatggccggcagcacatacaggtatgaaaggctctgtcctgaaaaccatggaatcaaaatccacgtcatcgtagtatccctcaaccagggcaaactgaatctccccggaaaccagcttgtgcagaagctcgtccgtgttgttgatgacaacgctgatgcggtccttgggatggctgtggatatagcgggccaggggggtggatatcactgactccccgattgtcctggtggtcccaaaccgcaggctcagtcccttcccggccccctcaaacatctgttttcgcaggaatacctcatcgttcttaagggtggtggctgcgtgaagcagacgttctcccgccggggacaggtgtatcttctttccctctgccaggaacagcttcacctggtacatgttctccagataccgtatatgctgtgacacggcgggctgcgtgatatgcagcgcctccgcagcccttgtataattcatgtactcacagacagcaagaaatgtgtaaaccctgaaatccagcatctgatttcctccttttgttctccctctgtttctcttaatcataacacattcttattaaaatataaatatatataattttactttatgctttccataagttaccatataaaccgtgcgctgggttttacacccggcacacggtcaaatatcaagctatcgggaatatgaggaggaaaaagaaatggcatcattacaaaagaaatggaaaggattggcattctgcctgctgctggctgtcccttcctggtttctggggaaaatgttccccatcatcggcggcgctgtcatcgccatccttgccggcatggtcatagccgtattcatgaaaactaaaaacgggctggaggacggtatcaagtttacctccaaaaaaatactgcagtgggcggtcatccttctgggctttggcatgaacttaaatgtggtgctggagacgggaaggcagtcccttcccatcattgtgtgcaccatcaccacctccctggtgattgcctttgtgctccataagctcatgcatatcccatccaacatttccactctggtgggtgtgggctcctccatctgcggcggttccgccattgcagccacggcgcctgtaatcaatgcggatgacgatgaggttgcccaggccatatccgttattttcttctttaacgtgctggcagccatcctgttccccaccttcggcaagttcctgggatttgacaccgcatccggcaatgcctttggcgtctttgcagggacagccatcaatgacacgtcatccgtcactgccgcggcagccacctgggacagcatgtggaatctgggggcagccaccctggacaaagcagtcacggtaaagctcaccaggaccctggccattattcccatcaccctgtgtctggcctttatccggaccaggaaagaagaaaaggcggatcaggccagcggacagtccgtaagctttaaagatatcttcccgttttttattctctacttcatcggggcttcggtcatcaccaccattgccatgggagcagggattcctgcctcagtctttgcccccattaaggagctgagcaagttcttcatcgtcctggccatgtcagccatcggactgaacacggatctggtaaggctcatccgcaccggcggcaagcccatcctcatgggagcctgctgctgggtgggaatcaccgcagtgagcctggcacttcagagcacgttgggaatctggtaaaatacatacatgtaacttcaaaagggctttcccggcagcagttaaaatgcagccgggaaagcccttttttacgcatgatatttaagttttgtctccaccaggaaatccacgcccagctcgtccggctcccttctcacctccacattttcccgttcaaagaggtccggatatttggacagcagggcacgctcctgattcacaaggcggttcagatgaaaattcaaaatagtgtgaagccgctcccagtccttggccagaatggcgtctgttatctccttatgctgcttaagggcttcccggtctatgccctggtccgccatggccaaaagacgaatccgcatgtaatggcctgaattggccgatatgatgtcgttgcagtatcccttgttgacccccacgtaaaaaatagaatgaaagtacatatcctcggccagaaatgcccgtatgtcctcctcctccacaaacttctcctgacggtccagggacatctccagctctgtgatggcctttaaatcacacactgccataaactccagaatcaccttctcctccacacaggtcctgagaaagcgctcgttaagcaccttgtcataattaatcttggatatcatggttccccgctggggaagaaaggtgataagcccctccttggaaaggctaatgagggcatccctcaccggcgtccttcccacctggtaggcctcgctgatatccctgatgctgaaaatcatcccgggacgcagcttcaggttcagaatgtccgtgcgcagtacgtcatatatgttgtcttccgaattcctgctgtctgtgctgcccatagaactcctcctgtcagatctctgctacctccctgtacatgttcagggctgtctctgaattataattatagtacaaaaggatatctaaggcaaatggggaatagggaaaaccatttaattttttggaaaaatacattccggctatctccgacagggcccttatggtggaacggttctcaaaaccaaggattttccacaggcgtatcttctcggtcctggtataaatcccatcgtactcctcttccagatagtggtaaatttcatggcccagaatcaaatcttccagctgctcccttgtggtaaagccgtccagtgaaccgcctttaaccgccttgtcgataggctccctcataatttgtatcaggccgggaggggtgaaaagggcaaatagcaccctgtccgctatctgccccttatccaggtattccaccctgagtcccagctttccggcaatctcccggggatttgaagtacccgtctggtccatgattttatccgctgtttcatagccgcagcagatggatttttctatcatctcttttttccggccgcagtccaccttatcccggagcgcatccctggagaatgcgtacattccccaggtcatgtcgtccacggcagccagccccttcatcattttcctcaggttcatctcttccatatctctgtcctccagaccggtcccatggcccccttagcgggtccgcgccttaattctgcctgatgttggcagccaccaccaggatttcttcatccggttccagtgaagatacctccaggtccgtcaaaagctccagctgctcaaagtcctgggccgtaaaatccatgaccctggcgcccatgcacaggtagtaatccggccttgcaatcagctctgtctggtatactgccatatcgtcccagagctgtttcagcgcgtccagataggctgcagccgtggtttttaaacacatggcccttccccgctgtacctttatgaatcccttcttatccacgatgcggacagcgcccggcgtacccggctctgttctttcgccgtacacatagaagtagggtgacgttgccagaagggctgtatccccatccgccagcctcatgtcctctgctgccagatgccttgcctcagtctcatcgcattcctttagcaggtccgctgtcttcacctccgttgaaccggtggcaatggccgtcaccttggaggtctggggatctatttcaatatgaatctccacggattccgctgttgcacctgactcaatggccttgttaagggcctcatttttaatggcccggatatcgtccttggacggggaaggcatgatgcgctccaccacgtcacggaccatggacagggccactcctatggatgaaatgacctcggcattctccggaatggagtacttaacccccatcttattgctgaaatacacgatcagggaagcggctccgcctccgacgcccaccagggatatctggtccttttccagcttatatttctcagccagctccagtatcaccggctcaatcttggcatacgccttttccataatttgctttgcaatgtcctccaccgttgtaccgcagtagtcagccagggctttcatggcctttctggcggattccacgttgccgtaggagaaatgttccggctttaccagtcccagcacattggctgcgcaggagttggtgagggtgacagcggatccgtcctccatccggattctcacatagtcgtccggatccccctgcttgggtgagaagaattccaccttcggccccctgattttatccgtatccgtgaacacggcataatccagtcctgctatatgggcggaacgtggtcccacatccaccacgccctgcttgttagcccggaccatggagccgcctgccacgcccagcacccgcacatccagggatgagatataggtggcatggccgcctacgatggaatagtcaatggcaggccgcccgttcttgataacgcctatattggtggtggtgccgcccacctcaaagtacacgccgttggaggccctcagatacataagggatcccatgacagaagcagccgggccggacagcatggtcagcacagggcgcttcttcatctccgtaatctccatgactccgccgtcgcctctcataatcatcagaggcacatgaacccctgcttcccggacagagccttccgttgaattggctgtatctaacatctttggaaggatggaggcattgatggcagcggttctggtccttcttgtaagaccgtagagcttggtgatgtcgctggccatggtggtggggatgcccctggcgctggccgcctcatacacctctgcctcagggcctccgtcgtccacgccgaacgccatggaggataccagtacctgggcccctgacttctgcatgctatttatagtatcttcaacaacggccatgttcattttcttcacgttgatgaagtcatttacaattttaattttcttctggttgcccaggtctatatcatccagttttgtctgtttttttgccaggaaaccttccaggcctccctttgccatgccgatgacacctacagtggccacatcgccctcaatcagggcattggttgcctgggtggtggagtgggccacaaataccacatcatccgggctgattccattttcattcaggcagttttcaaaggacttaaccacacccgcggccacgcctctggggtcgtcgtgggtcgtcttaacggaagatttcccgataatctcatgggtggcgttatcaattgccactgcctttgtgtgggtgccgcctacgtctatacccatcctaactgatcttcccattttaaaacctcctcatctcaaatcatcaaaccgtcttataagggggagccggcaggtatcccgccagctcccatccggacagcagggaatccttccctgctgcagccggccgtcttatactcccgttcacatctacatcaggccgccgtacagtacgaatactgcagcgcagcagataatgcctacaatccatccggtaggaatggacatcttcatataatccttggtggaaaccttggtatatccaaatccccatgcaacccaggactgggtgatatccagatgctgaggcgcaatggtggtcactgcaaacagcggatacaggaaggctaccggtgcattgggaagggtggccactacaactgccaggattgcggttccgcatccaaccaggttcatggggccgcggaagaagccgagaggtgtcagtatggcgaacacgatggccagggtaatggctgtggtaggcacaaatcctcccaggatagctgtaaagtaaggcgctgcataggttgccgcgttattgaacatggccagggtaagcaggaatcctaccatgggggccacatcaatggaaccatcggtaaacagctttgcaaagaggcggcagatttcggaatagctgcccttcatttttcccgttgtaatcagtgcgtagatgccggaaagacagaatcctaaaataatgggaatcttgaagagcaccacgcccaggacaggaaggataacggaaatccaggaaatggccggggcattgtcacttgccgaggaagcagtggccgcccatgcgtgggctgcctttttgttcatggaaaggttggcaaccaccagcactaccacgatggctaccaccatgcaggtaacgccaatcttgaagtaatcgttgtaggtgtaatcagctgccgccgcattaaagcccgcatatatggtctggtactgctggaaattgacgatatttccaaagatgcctgccatgatagatcccataaagctgaacatggccacaggagccggaatgcccagtgaaagcagaatgggcagtacgataaccgcgatggaaataacaggtccgataccggtcatggacataaagataatggccgtaacaatacacaggagcgccatggtgattctgggcttatcgccgcccagctcaaccaccttacgaatcagggtggccgctatgccggtgtccaccaggaccctgccgaagaatgctccgaagaatacattgaccagaatggactttgcatatccggcaggaccctctgcatatacatactccagcacctggatgaaggttttgccttccatggccgatgtgggcgaaaatgcgttgcccaccaatgccagggcagtccagaacgttgccatgattgcaaatcccaccatcaggttgaatcccttcacacagtaccataccatgcctaagaaggacagaatcatgataataccgataattacattgatgttcatacgaaccctcctttgatgaaaatagttgaatgctctccctcagagactcccttatgcctctgcttttctgtaccggagcgcaggaatgacgggaatgaatctccggacacgttctggttacatacgcacctttcattcatcttaaccccttgttgctgatactaatatattagtactgatatattagtttgtatagagtcattttccactgtttttcatctaatttttatacatatttcacaaaatatcacatttttacacagtgtttttacaccgttttagcggctttttaacattgtcgcatctcgtttattgctatctaatatattagctcgtccaaaacaatccaaggatgcggtaagcgttcatactctaacaaaaaaatcggcatgccgtgattaacagcataccgaaagtttaatagccctcatggtcctgaaacgtcctgagatacattttatcccgccgggaatgggcgtctcccggcatttacattaccttctctctcctccccttttccagggccctcaatgtactgtcatggagcacttccttcttatacgggtcctgggacagatagtaggaatagaggatgtccgtcagcaggagaatggggaactggggtgaaatcacatttccatggttcagatggagcagcgacggaagaagcaccacctcatcgcagaaggcatcgaaatcaggcctgttcctggcagtgagcatcacggtcctggcgccccgcttgtgggcttcctccagaagatataatacttcctccttctcaccgctgatgctgacgccaaagacaaggcagttctcgtcctggaacacgccgcgcatacgtatcatgtcgctgtggtccatggacgtgatgtccaggccgatacgcataaaacgcagctccatctccctggcagccaggcctgaacttcctgttccgcagacaaacacgcgtcccgccttggccatataccggcacaccctctcaatctgcttttcatttaccaggttatacgtcttattcagaagttcctggtaggcattgagcacagtcctggtgttgcctgtcatggagtcctgcctgaccacaaaattttcctcatactggtaaatgaattccctgtaacccctgaatccgcacttctttgcaaaccgcgacagggacgcctccgacacaaacagctttccggccactgacttagctgaaaaatccatctgctccctgttatagataaaaaaatccgcaatactgcgctccaccgttgtaaaattcacataattggattctatgaccggtatcactgatttcagatattccataatacctcctcctggttaagaccacagacctgctttcggccaataccggtcagctccgggcctttccccgcctctccaggaaatgatagtaggctccccgcatgcccgcgtcattctggtgcctggcaaaggccagctctgtcttttcatatatgctggataccagataccgggcaagagccttttccagtctgggacgcaggtacgcctcctgggccatgattccccctcccagcactacgatctggggattcagcacataacatatattggaaatgccttttcccagacaatcgcacatctggtcaatggcctccacgcatatagagtccccttccccggccagctggaaaatacggtagccgttccactgggcctcaggctcccccttggcagccgccacccgttttaccagtatgctggcagctcccagggtctggaaatcacttccgtccatgtgcatgtatcccacctcgcaggcgcttccgctccacccgtgatacaccctgccgccgatgatgatgcagccgccgattccggttccaaccgtaaggcacagggccgactgggcccctgccgctgccccggacacagcctccgccaggccggcgcagttcacgtcattctccacctcgcagggaagtccgaattccgcctccatgctggccttgatctttgttcccgcatactcaggaatcaaaggggctgcatagaatatctcccccttttccacatccaccatgccggcagtggacacacagattccctctgtcttccggtccttcaggtagtccgctgcaatccccatgaccttttttaacagggcaggcccgcctttaaaggcctcggtgggcaccttaccctttgcaagaaatttctcattttcgtccagcaccccgtgcttgatttccgttcctccgatatcaatgcaaatatactgtttcatcgtagcaccgctcctttaaatcttcttttcaccctgacgccgccctttacgccgccctgccgcaaaaggcaaacctgcccggagcgcagacgggatgctccgtcctgcgttccagggtctttggtttgcctctgtatccgggtctatatacttttaatggtcaatccgcaccttgaatatggccttcttgattttctcaggttcgtttacggccacggctgtgcggtgtccgtcctccgggtagcaaatcaggaaatcccccggcccgagcaccacatggctgttgggtgcgccgtccatgggaaggaagtcatccttctccacatactccttctgctccatgttctctataaagtttaaatcaatctgctcctgcccgtcaagcattaaatgtacatccaggtaattcctgtgggcttcccagaagcggttctcaggccgggtggtctcatactccaccacattgacaaacagcctttctccgtcgatgggatggcatcctttttcgtaagacgccaaatcaagctcctttgcataggcaaagcattcctttaaatcctcaggaagaaaggcataggtcttttcctgtgtgatgtttccaaatatcatgattacctcctgttaatgaatcattaattgtggtaaatcgtagcgtcctttacaggcttggatgtatccccgtccatctttcttgtaatcatgctcaccgggattcccactaccagtgagatggcgatggagataatggaataggaccagatggatacggagcccgcaggagccatgtacttgatgcagaccatggtaaccgctgccacaaagaatgccacgtatgcgccctttgcattggccacctttgtgaatgtacccagggcaaatgtaccgcccagcacgcccagcaccagtcccatgaatccgttgaaccactcataagctgacttgatttcgccgtttgccagtaccatggacaccagaatggccacaatgcccacgcccagggatacatactgtgcgatttttgtctgaagggcaaagctcatctccttcttggaaagacgctcctggatatccagggtccagctggttgccactgaattaaggccggtggacagagtggactgggatgccgcatagatggctgccaaaagcagtcctgtgatacctaccggaagctcataagcaatataggacgcgaaaatctggtcctgctgggctgccggaggaagcgcgttctggctgtagaatacatacagtcctgtaccgatgaggtaaaatacggttgcgatgaagatggacagagcgccgttggtcagcatcatcttgttcagtttcttcatatctgtggtggtggtgaaacgctgcacaatatcctggctggatacataggaggaacaggtgttaagacctgcgcccacaatcagcaggaatacgctgtccttcagtatattgggattgaaaataggctggtctgccgccaggaatttaccttcgcccatggtctggaaaatggctccgaacccgccgtttatgccgttggccaggtagaacagcgcaaaggtaacgccaaccagaaggacgctgccctggatgaagtcggtccagagaacggatttaagtccgcctgtgtaggaataaataatggcaatcacacccatggcaataatcaggagatttacattaaggcctgtaagcttggagagtaccatggacggaagatacatgatgatggacatacggcccacctggtatacgatgaacatgacggcgcccaggacacgcaggcccttgcttccaaaacggatttcaagataatggtaggctgtgtcgatgtccagcttgctgtagattggcaggaagaatttaatggtaatgggtatagccacaagcatacctaactgtgcgaaccacataatccatgttcctgcataggaatttcctgccagggacaggaaggaaatgggacttaataatgttgcgaatatggaaacggaagtaacccaccacggaatggtgccgtctcccttaaagaactcttttcccttcatctcctttttggagaagaagagtccggcaaataatacagccgcaagataaacaatcagtataatcaaatcaattgtagtaaaaccctgcataaatcaatctcccttctttgctatacggaaaaccctgggaaacatcctccttttcccaaacgcattccggtcccatgccggccctttctccctccagaaaggaccggggaccatttacattatcttcagtactgcacaggtaactgtgaacagagcgcctgacatccccgtcagaaacacacctggtcttagcagtatgctgcaaccgcttccttcaccatgcgggctgcttcctgtgcaatggcaaggtcggattcaatcagctgaggcagcggttccctgaccccgcccagatccagggactcgttgatgcgaagcatctctttaatcataccgtacatattgccgtgtccagagcacatcttgtagataatgtcgttggcagcatactgtaccttcatagcctcttccatcttacctgccttcaccagctcatccattttcaggaacagctcaggcatcacgccgtaggttccgccgataccggcctctgctccgatgacacggccgctgataaactgctcgtccgggccattgaagatgatgtagtcatccccgcctgccagcttgaacatctggatatcctgcacaggcatggaggaattctttacaccgatgacccttgggttcttcctcatctcggcgaacaggctctgtgtcagggccacgcctgccagctgggggatattgtagataatgaaatccgtgttgggagctgcctggctcatggcattccagtaggcggcaattgcatactccggcagatggaagtagatgggcgggatggatgcgatggcgtcaacgcccaggctctctgcatgctttgccagttccacgctgtccttggtattattgcagcccacatgtgcgatgacggtcagcctgcccttggcagctgccattacattttccagtgtaatcttgcggtcttccaggctctggtagatgcactctcctgaagatccatttacataaacacccttaacgccttttctgatatggtactcagtcagagcccttaccctctccgggctcacatttccctctgcgtcgtagcatgcgtaaaatgcaggtataacacctttatacttttctaagtttgccataatcttacttctcctttcaatgacccgttgggtcccctttataatgaaatggttaacatgtttgtactaatccagcgcctctgcaaaagactttgttatcagctggggcctggtgataatggaacccaccaccacgctgaaggcccccagttcaataaccctcttcgccttttccggcgtgttgatgtttccctccgcaatgacacggtgtttcacctttgccacaatctggcggatgatttcaaaatcgttggattcaattttaaggtctctgctctggtccgtatagcccaccagtgtggtcccgataaagtcaaatcccagctggtctgcgtgaagggcttcctccactgtagagcagtccgccatcagcagctgttccggatagcttttccggatttccctgtaaaattcatccagggtcctgccgcccggcctcaggctgtgggtagcgtccagcgctatgatatcaggtctgacttccatcagctcgttgatttccttcatggtaggcgtaatgtataccttgctgtcctcatagtcacgtttcacgatgccgatgacaggcaggtcaacccgggcctggatttcagcgatatcctccttggtattggcacgtattccgtacgctcctccctccttggcagccagtgccatccggcccatgataaaggatgaatgaagcggctcatggggcagggcctggcaggatacaatcagcttccctttcaggctctctactttttcgttcatatgagttcctccttgttatgaatgcctggcagccttgttccggctgctcatctcttgtagctttagtataacaggtttgattttattttcaatagcacttagatgttcagaaagttctttcactttttttaaatcagggcgccatattacacaagtttttgtcaggtgatttatatattatgcacaataaaacgttctttgtttcttcataaatgcaaaaaaaggaagcctacaaggcttcctgacatcgatcccggtactgggccggcgtttcctgggtatgttttttgaaaaacttggaaaaatagttggggtcctcgatgcccacgctgcgggccacctcataaattctcaaatccgttcccttcagaagctttttggctgcctcgatgcggatggataccagatagtccatgaagttgattcccataacacacttgaaggtcctgctgagatacgagttgttgatatagttgatctttgatatcttagccagcgacagagtggaatcatccatatgctcgttcatgtactggacaatccggtggaccagcatggtgtttttcttgttcatgtactcttcaatctggcagaccgtaaagtctgtaaactggctgatatacttctcaatctcctctgccccggtgagacggagtatcttctcatagggcagatggtccgtgctgtatatctctatgtacgggattccattgtcgctcagggtggacagggtcacattgacaatggaataggatatgacaagataatccgaaaggctgctctgcggcaggcccttaagtgtcccgtaggccgtgcccaccagctgcctcaccttgtccccggaaggtatccccaggtacaggggcagctcctctgtcagggtctggatcagctcctggaggcctcccatatcggattccctgcccgatgaaagaaatgcctggttgtggctgtagctggcaatcatggcattcttatatgcctgcttgtagctgtagcggatctcctccagggaatccaccggatttccgcagcccgcatagattcccatggacagcttttctttaatcagtacggtaaaatgggcgccgtaggacatgaggctgattttcttattctggctcaggagaatcaggttctggtgtatgtcctttagcagcagcacgtccgtaaggcggcttaccgccggggacagaacctccatgcactgctgccttctcagctcgtcctcctccgggtcattgtgtttctccggcatcagcaccattacattatagtgccccgtatcccttctcagaggaatatcatagtagcgtatggtaccccacaggctttcctggtccaccttattcaaaagcaggttgttgaggaaattctggacaatcagcgtcctggactccgcaatcctgcttttaagcccctcaaactcaaaaatagctctgcgctcctccatgatatcggtccgcacatccttcatgacctcaatcagttccgccctccgtatgggctttaacaggaaactcttgatgcccagctccacggatttctgcgcgtactggaacaggtcatgggccgtcagaacgatgaccacgatctgcggatactcctccgccagcatctgggcaaattccaggccgttgatatagggcatctcaatgtccgtgataaccacgtcaggatgctcctcttctatcagttccatggcctggttggcgctggccgcgtcctccaccggctcatagccgatggactgccagtccacaaaaaccctgagaagtttcctggttttctcctcatcatccacaaacatcacttttaacagctggtcatatccagtctccatggtcctcttctcccccgcaggtcaccggcagaaggaaggtgatttccgttcctccctccggcacgcttctaatctggtaagacgcctgttcaccgtatatcagtacgattctctgtatggtgccaatcaggccaatcccggttcccgacacgtcaatatcaatattccatattttatggtagtcctgaagttttgacagggcggaagcatctatgcccactccgttgtcccgcacctgtattttcatccggccgccctcctccggtccaatccggatgcggatatgcccgtttccgcccatgggcttaatcccgtggtacacggcattctccactaacggctggagaatcaggtggggcaccagaaccctgaggcagctctcatccacctggtactccacatcgaacaaatccccgtacctgagcctcaaaagctttacataatcgtttacaatggctgtctccttttcaacggttatcatctggtccccctggctcaggctctgcctgtaaaagctccccaatgtctctatggcctcataggtctgggacggctcctccgtcagggccatatagccgatagcatccagggtgttgtagagaaaatgaggctttacctgctcaaacaacgcgtgcagctccgccttttccttgattttctgctcctccaccagcctggacagcagggatgatatctcgtccaccatgttattgtaattcgtctgtaaaatcccaatctcgcttttggggtatttgacaggtatcttcctgaaattccggtcctttaccgtattcatcattccaatcagcgcatagatgggattggatatggacttggatatgtaaagggagccgaaaagcatcagcaccacattcaccagaaaaataagggtggcgatcaggaacaggtccttaaaagcgctgcggttcacctgactgggtatcctggcaatcaggtgccatccatagtccggcaggtaaagggaagtggtatgctccccatcccccttgcggcttaccagaagtttttcctcatcactgcttccggccggcgttttaaggaaatcctggtattcaaatccgggcgtacccgcaatcaggtttccatcctggtccataatccctatcatggcctggcttccataagcagccgcgctgcagatttccgctatggcatctgtgggaatattcataataatgaatccctggggcttctgggtctccaggctgttgatggtccggatgagagacacaaacctggaattgtatcttttatagaaaatgcctcctgcctcatactccagtatatagctcccccctgcttccagggctttcctgtaccacggacatttcaatgtggaatccacgctgagccgcttcatgtcatgcttgtccacgccgtacaggtgcgccgaaaaatccagaagatagatggactccagataatggttgctgtcaagagcggtaaacagcatgttgtcatatgtttttctgtcctccggcctgggaagatggttcaccacatccagggtgcctccttttaacagcatattgaaatcatcgttcacattaaggaccatctcatccagattgtttctgaccccagtgaccatctgcaccgatgactgctctatcatggagtcctcctgcttcctggcagcccacgaatacagggaataggtcagaaaaaagctgatgaggaaaaatatcacgaacacggccatgattctgcgtgaaatatgttcatggaacagccagtcccaggccccttttacattctcacataaccctttcatatacatccccataaccggctcatgccggacctgggaccggtgttatccggccctatgtccagcacagcgcaagtctctcaagtattttatttacctgttcccctgaggtccccatgttcagcctgaaccagcctctgccggcctccttgaaatgggttcccataagcggtatcaaatggcccttttcttccagcagccgtctcatgtcctcctcggataaaccggtgcgtccgtatccaatccacataagataggtgccgtcaggcacataggcatccagccagggcagttccctgtttatgaactcctgggcagtctttatgttttcatagacctgcgcccgcatccggtccacccactccccgcattcccggtaagcaggtttaaggatatcggccgcgaacacattggggttgtgaagcccccaccggtctatggtttcctccatggcccgccgcatttcgggattagggagaatgacactggaaaaaatcagtccggggatattcagggtttttgtcagggaattgaacacaataaccttttcctgctccggattatggtacatcgttaaaagcggcttatacacatggcccggccacacaaaatccccgtgtatgtcatctgacagcagaagcaggttatggcgtttgcagaaggcgatgacccctgacagttcttcatccgtccacacccttccggtgggattgtggggattgcagaggatatatgccctggttttctggtccgccagcctttccagaccgtcaaaatcaatggtgaaacgcccatttttaagaatcaggggactttccttcagattccggccccatttttctactgcccctgtcagcgcaggataggcgggtgtattgacgataatggaatctcccggctctgtgaaggtgtccaccgccatgttaagggccatgttgatcctgggagagaacagcacccattcctgctttacctcacagtgataccgctcacgcatccagtctgaaaccagtttctcataaccgtccggcagttcggtataaccaaaaaccccatggtccagcctgcgtttcatggcttctaaaaccggatccggcggcgccaggtccatatccgccaccccgcagtacagataatcgggattatccctgtattcctgtctgtattttgcgcaaagggtgtcatgccggtccgttacatatctcacttccatcctgtttccctcctgtcatctgtttcatcttgctttaacccgttcatacggcttataaattcctccggcgtgatatccccgcgaaacaggcattccaggctgtccagatatctggccgcgtcggttccttccaggagattatcccaccatatggtatagctggcggcatggtccgtgtactcatgaatctcctgcataagcgggtttaactgggcgtcacccgtatccacgttgatataggggaggtcatttgacttgcatttataaagctccactgccagccccatggccatatactcagccaaatccacggtaagttccgggtcctttgtactgctgctcactgcaaaagcgctgtcaggcccccctgtgaaatcatatatagtggattttcctgaccctgtcaccggaaagggcgcggccttcaccttgcccgccaccctggatgactccctgtagacacgggatgaagtccagctgccgttaagatacataggcgcctgaccctgcatgaaaagagcctctgcctcctccctgagcgcagtggccgagtcagccgtaaacgcccccatatccaccagctgacgcagttttctggcagcttccaggaaacctgggtcgctatagtccgtccgctttgctgccgcgtccgcaaccttttccggccccacttcccggagcgccagaaggtcataatacatggcaatggtccacggctcattgcctcccaccggcataggggttatgccgttgtccacaaaagtctggcatacccggatgaactcatcccaggtcacaggtatttccaggccataccggtccatcatttccatgttgtaatacaccatggccacagaactgtccaggggcagcgcataggtcccgccgtcaaactggattcccttcatcatggcatcgttcagatgggactggaaatcatcgctgtaataccggctcacctccagcacctttcccgcgtccaccatgggttttaagaattcatggctccaggtataaaagatgtccggaagctcattggccgcagccgcggccttaatctttgtcttatagccttcattttcagctgtatccacttctatggtaacattaaatttatcctctgcctccctggtcagctgctccatgatacgcgcggcctggtcgtcatcacttccatagatatgccataaccgtatgaccggccgctctcccggactgtcctttgcaggcgccgtcatatccacccggacatcctcatccttttccgccctgctgcatgcccccattccaagaactgcggccaagacgcacatccatatggttaaatgtctcaaacccttcataccttccctcgcagcatctttttccggtacctgcgttatccctttacagcaccggccgtggcgccttccagtatgcgtctggaacagagcacaaacatgataagtattgggataaccgacagagcgactccgatatacacagttccataatcattcttatatactccctgcatctgctgcaccagaatgggcagtgtgaatttgtcctgggagaacaaaagaatggacggcttcacaaaggcgttccaggattccacaaaggtgaaaatggcctgggttgccactcccggcattatgattggaaaaatgatttcgttgaaaatacggaactccccgcatccgtctatgcgggcgctctcgatcaactcatccggcacataggaatcaatgtactgcctgttccagaataccatggccggcggtgcaaaacaagtgataagaagggccgcgtaattgtccagcatatgtatgttgttcatgagctggaaatacccgatgattcccaactggcccggaagcatcatggtagccagcaccagccagaataactgcttgttgtacttaaatttatacttggcaaagccgtaagctgtcagcgcgcccacgtaaaccgtaatcaccgtgctggcaagggagataaacaggctgttgagcagccccctccatatatttacattggcagccaggtgctggtaattggtttttaaggattttcccggcgtcatctggaaggaggtggccagggcggcgttgtcatgggtgcagttgataatcatgttgtaaaagggcacgatgcagattagtgccagcagaaccaggaccccataggtaattgcccggaaaaactttgtctttacactgtacttcttgagttcctttttttccatttaaaaattcctctccttccctgccgtatatttcataaatatcagagaaaatacgatgatgatgacaaacaggccgtacgaaatagcggaaccatatccgtaatcataattctggaacgcgatgttgtacatatacatgaccatggtgaggacagatttgctgggtcctcccgtggcccccgcaaaggtgaagggcaggtcgaaaagctggagtccgcctatgatggatgtgacaaaggcataggtcatgatattgcgcagctggggcagtacaatgtggaaaaaggtctggaatttattagcaccgtccacctcggctgcctccatgatatcatagggtatgcccttgattcccgcggtaaatatgatggtataatatccaaaatactgccagaacagcacaaaggccacaatcagctgggtaaacagcccgttcatcttccagttaaccggctccgctatgatatgtaaggccatcagaagcttgtttacgcttcccgccttaaagtcaaacagcaggctgaacaggacgcccagggaaactgcggttacgaggtttggaaaataaaaaatggttttgaacaggttcccgcccctgaaccggtgctggttcagcagaaaggccagaatcaggccgaatatcatctggggcgccatggccagcagggcgatgaacactgtattgaaaatagatttgaaaaacaccgcgtcatttaaaagacgcctgtagtttgccaggccggtaaagacaggagtccccaggccgtcccagctgtgaaagctgagtttaaacgtgtacagtatgggatacagtgtaaaacataaaaatataataaaataaggcaggataaaaagcaatccccgattgctcttatccaggcttctcctttttgagggctgtatgctcttccccttctccgtcatgaaatcctcccatctgaaggcaggccaaaggcttctttaaagcccggccccttcttccgtgaaacagatgcaggatatgaattatctcacaccctgcatcctctggtcatttacaaatccggcagccgcactcaggtctgccgtggtccggcatgttctagtcaattactatctcaggatagatgcgctgcatatcctccttgaatccctggcatgcctcctccggagtggcgccgccgcctgccagtaaatccatctgggaagtcatgctggtccatgcctggcggtcgtacttggtcatggggtctgccttgacgttcattgccgtgtcatagaagctctggaaatactgctggtcgcctgtgacgatgtccgtatgcccctcttcgatacactgctcgatagccggtatatatgccgggaaatcgcctaactggccggccaggccattgaccaggtaatccttgtcagctgtcatggtctttacccaggcataggcagcttccttgttcttggaaccagagtaaatgccgtaccaggttcctccgttctggtaaggcgcgggtgcctccatatagccccatgtatccgctgccttctccatttctccctccgggatgcccggcttgatgcagaagttaagggcccagctgggaagtccgatcaggataaacatatcctgggagtacatgcctgaggtccagcctgccgaccactggtctgccctggcatccacattgttgtcaaccacgcgctgcatcaggttgagctgctccatcaggaaatcatcggagatgatatggttgttctcatccacccacggagcgcctttataggaacagtaaatctgctctacggtctcaatgtcgtccaacagtcctattttgcccccggatttctcattcacctgcttgcccacctcgatgatggaatcccagtcctttaacatctcatgtaattcttcgggatcatctgttcccagatattcccttgccagagcctttttgtaccagaaaccgcctggagtagcctggtaggacagccctcttaaattaccgctgttatcccttgaaagctcgtccacatagggaatcatatccttggaaagggcctctgcgtcgtagctctccgtactcaggttctccagcaggtcggtgttcttgtacataccaaagtctgaaatttcaaaggtggccacgtcaggcgcattggtgcctgtgcggaatgcgttctggagttttgtgcggtactcgttgcccggcatgacagtgactgtcacctttacgccgggaacccgcttgttgaattcttccacatagaagttcatctcgctctggcttaagttggtccacacattgatttccccggtggctccggacacgtccacgctggctgtgccgccagcctggcccgctgtctctgtctttccctctgctgcctgggaggattccttaccggaagcttctgccttttgcgctgcttcggtgggcgcggatgccgatgaaccgcatcctgccagcgtacctgctgccagggctgctgctgtcaataaagctaatggtctttttctcatgataattcccctttctattctgcattccgggacatgttcccgaaatgttgttactgttatcctgacaccttgctgtttccggccggctgaagcactagcatggccgcaaatcagtctgtccgtccaccatgcacacaaactcgctgattaactcaatacagtccctgacgtccttcagggaacacacttccgccggagtatgcatataccggaggggcaggttcaccagcgctgccggcacaccgtgtccgctgatatgtatggcgtccgtatctgtaaaggttcttccgggcgttatgaccggctgcgtgcggatgtccagccgcccggctgcctgttccagaatccggttcattaccggatgtcccataatccccacacagataccgggaccgcctcccagggccaccctgccgcgtaccccgtcatccccgcccggtccatcgctggcaaaggtcacatccaccgcaacggccatgtttggcctgataccggcgccggcccaggccccgccgctaaagccggtttcctctcccaccgttgtcacggcatagactccgtttctgcatttcttttcctttgcccgtcttaaggcttccatgacaatgaatgcgccggagcggtcatccagggccctggaggtgatgcattcccccaacaggggcctccaatccgtatcaaacaccacaccggaccccacaggcacatgccttctggccgcctcccggtttccggccccgatgtcgataacaaggtctgtatcagacaattcttcctttttctgcaattccccggaacttgccactgccccgtataccaggtcctttcccgtgtcaatccgcaccttctgtcccagatacatccgcggggtaattccccccactctggctgcccgcagaaaaccttcctctgtatggtccgtgaccataagtccaatctcatctatgtggcctgccagcaaaatcttaaagctgctgtccggattcagtatgccggtcacattgccgtttacctcacgcctaacctcatccgcaaagccttccatatacgctgctgctgttttctggatattcgtttccctgcccgatactccctggcaggagagcagccggtaaaaaaattcctggtccataacttccctccatctgaacacgttttagattatatcttttttcagttccggtatgaataaaataaattgatggaaaaccgtatgattttgactgattttcgcccggattttctttgcagatgccggacaggacaggaaatgacgtttagaatggacagcttttactattttagataaattttatatctaattttcgattatccgcataaacactatactttcaagtattttgaagtatagaaaaaactcattttaccacgaatttaccacgattgaatgagccttgatatgacctataaaataacacccaaaagacatcattacacctaaatggtgtctttttaaaaagcagtcaatcctaagactaactgctttgtgtgtatggatatgaaattgtcaaactgggatttacttatatctattcctataaaagtgtcaatatatatccgtctatcagagcaattagcagatacataataaaggctctgataaacgcttctatatgctttttcggattttgatacaattccttttctggcatttttcttaaacgaacacgctttgtattccgccaccataaaaggtctacaataaataagtcaaagatattcaatccctgtcctataatacttaaacaaagaaaattatgtgtgaagccattttctttgataaacaaccctaatataaatagtacgaacagaaataacagaaaattggatataaatttcttcaaaaaattttttgagcagcaaaatgcgcccgtccgaaaagcccggacaggcgcataggtattgtaagcagtatttagatgattagacagttcatatatacaagcgtaattttccccggtggtgggcgggctttttttgatgtgtcaatgaccgtcggattttgtcgatagggtatgtgcttcatggcggctacctcctttagccgccgcttttaacagtgataccgcgtcatttcattagaagataaaaagaaacggcggctttgatttttcaaagctgctgcggaaatcaaagaacgacaagcaacagttctgattttgctccaatatggttattaggggcacaaattaaaatcaaaaaagagccgataacagcagtatttcaaactgcatattatcggctctgcgtctgtgcgtctggctcttttaattaaattatttctgttgttttttggctttattatatgtattagctaactgtccacaagctgctttaatctctctaccatgagaaactctcatggtaacttcaagtcctgtttgctctaattgatgtttgaacgcaaccatttcttgtttttgtggtgctctaatttttgaattactcgtcgggttgtattgcagcacgttaatcataacatttttgcccttaaaccattttgcaagttgccttatatctgaggaacggtcatttatacctggtaaaagcaaatacgcaaataccacttttcgattatgcctttgagaataggacaatgcttgcttaacaacatcttcaatagcgtacatgtgcatatgaggaatgatacagtttctcgcagcctgtgttgctgcatgtaaagatattgtcaactgaatttttagatgttcttcgcgcaatttttttaattgattaactggaccaactgttgatacggtaatgccgtcggttggaaagttaagtccatttctatctcgaagaatatggattgctgcaatcaagttgtcgtaattgaataaaggttctcccattcccataaaaacgatacgatttactttttgacgtatcaatacaacctgctgcacaatttcagacggtgttagattacgaacaaaaccattgcgtccggactcacaaaaaatacagccaacagaacaaccaacttgcgtacttacgcaaacagtcccaccatctcgccgtttaataaaaaccgtttcaatatacctgttatctttcaattcataaacatacttttcagtatcgctacttttatagactttttttgttgatattgatagattttctttgtgaaatggctgtttatacaattccgtatataaggctcttgctttatcctctccaattacttccgacatttctttgtaagtaaatccgtatgggtcattcaatatttccgtaggtgtacttttaggtaagtgtttcatttaaatatccttccttttcaaaattaaaaagtttgtttttcagagtttttgattatgatttctagtttttcaacatcaacgatatgcgttaatttacatttagggcagaaaagaggaaaatttcttaataccgtattataaaatacttgaaccctcgtctttccgttacaaattggacattttatccaatatttttcaagcataatatttctccttttgcgcaaaaaaatgcaggtcaattctcaacatgagcattgacctgcatttatacatataatactacaacaaaattaaggcatagtttttatactatgtctatacgtcgttagttttgttgtatagcatacgcaaaataagcatgacaaaaaagcccatattgaaaatgggaaaaatcttttttgatttcaatgcttatcgaatacgcatgctatgtaacataaacattcccccccttttatataatattatatacaaaagcagcttgttgtcaacatatatatatatgaattattttggctaaatgtaaccactttattgctttccttaaattttccttgatattctgcaatactctttattcgattttgcacttcatctggataagatgaatagctttttaaatttttgttatctgtacctgttccccaaaaacatattagaaaaaacgcgatacataaaattacggtttcgattattataatcattctgtttcactccaaattctaatttgtccgtttcttcatatccacattatatcattttcatatctgcaccacaataaaattttatgcaccgataatcttattgaacagctctaacaaacaccatttcatcactccaatctgaaatttaggtatgaaaaaagcagtcaatcctaagactaactgctttgtgtatagagatatgaaattgtgaaatagaatttgcctatttcaaatcaaaaagagaattttcatagtcctttacatagtatcgtatatttttacgccccttttgaataatggtatgtccctctgcttctaatttttctttctgtgcttcaataccatttggatatttagcatttaattctccgtttgcttttaatgttctccaatagggtgtttcatcttcggaacgctgataactcgcccacgctacaatagaaacaaatatacccgctgtaatcggctctgtaaaatctgcaccactcaattttgcaaagtgttctcgtatttttccaaccgtaatcactttaccatacggaacttttttcattactttgtcatagtcaatcgggggagcaaaatacattttgtttccaccatatttctcaatacttttctggtctatgataatttgaaattttggcatatccttactatcatgcaacatagcattaaaatcttttttatcttcatttgccatttgtgccacctcctactttaaggatagtctgtttcttatttccatgcaatgaggctgtttgaaaattattaacactttcaaatttgtcgctttcttcatatccatattataacagttccatatatccgccacaataaaaatcagcatacccttagcatttatggaacaaaaatgcacactttttctttcttcctcttgattaccccacaacagaaaagaaaaagccctgtcaagagccttgccaccattggtggtgctttgcactctttactgggctttttgtttgctgtatcttccatgcaagaggaaattaaagacctctgttccatttcgcctttagataatcttcatagtctgcttcattgaagtctacttgtggagaagtgtcgggaatgttgtttctgttgtctatatccgcaagctgacgaaatatccaatcatcataagggtcatggtatttatactctttgggctgttctctgtatcggtctaaccctcgcatttccttatgcacttttatcatgcgttccagtttttgacgctgtatcaactgcttgatttccataagttcttccaactccgtaacctcattggtaatgtagttatggatatactgtatgagtttatatgccttgtaaaatgtgcattctttttcatcatcgaaaaattcattttcagacaggtaatctaaggaaacattgaagtcttgttcccgtttgataatatccatgatatagggctcggtgtggtcaatatacttccattctcccgacaataattcattgggcgttacacccagcacgtccattatcttctctaacgtatcaaaggtaggataattcacgccacgttcaatcttggaaaggctctgcatattgataccgattttgtccgcaagttcctgttgtttcattcctctgtgttttcttatggtctgtatgttttctcctaagaaactgattttcttttcataatgctccataacttagtataatcgctcctttcgttgcttttcttggtatttataagcatatcatacttaatctatatctaaaagtcaacaaaaacttcttgacaagtaattctaatggagttattatcgtattagacagagtgattaagcacgctagggtcaatcacacgcttgagtaagcatataaaatatatattttcactttgatagcatgaataagcatggactatcagaccgaaaataaggtttctgactggggctgttccgtttagccacgagccttacaaggctcgtgagcgttaagaacggggcagacacaggaagaaagggaacgcctttaggcgttcgtaaagggcgtatatgtaacaccgccctgcgtatacatgtcatagtacctagaaactgtgataaataaaggaaaaaacacaatttttaccccgcaaaaaacggggcatacgaaaggagcaatgcactataactacacacaaaaatttatccgttaagattgattacatcagcattgtatttgataccgcaaccgctgaagatgtaatcatgcacattttagatttaccgactgatattttcaatgtgtatccagcaacgataaaattcaagacttatcaagcacgctggcagattggagatatttatgtatcgggggacgcaagaaagacagaggacaacccacaggggctaggctgttatcttgttatgactggcagaggttgtgatgatattttccgtattctcgacagtaggaattatacctttggagatatgttccgacgttgtgagcgaagatacggacgggataacttccatttcacaagacttgatattgccattgatgataagaacgaaaagccattctttaccatagagcagataaagaaaaaatgcgaaaaagaggaatttatctcgaatagtgagggctaccacttcgacgaaagcaagtttgacgatttcgataccgcaaaaaccgtttatatcggtgctggaaaatcgggattgtcctaccgcttttatgataaggataaggaagtctgttcaaaacatgataagacgcttgatgaagtcggcagttggaaacggacagaaatgcaactgcgtgatgataaggctcatgtttttgccatgacattcaaagacagaccacttgaacttggggaactggctttcgggctattggcaaacaacctacgctttgtcgtgccaaacagaaatgaaagcaataagagcagatggaaaacgtgtcggttttgggaacgctttttaggggctgtggaagtcttgaaactgcaagtgccgaaactacataattcccttgaggaaacacagcaatggcttacagagggtggcgtgatttccgctgtcaaaagtttttacttcttagaagaacatgacgcattaggcggactggaaaaagtgggaactatgctcgataaggcaagatacagcacttccctttccagtaaattaaccgcccacttacagaggatagaccgcaccgaccttatcccctatatccagtatgacacgaaacatgggaaagggggcatctgatgaataacaacgatattcctgtatgggaaaaatacacccttaccattgaagaagcgtcaaagtatttccgtatcggagaaaacaagttaagacgcttggcagaggaaaacaaggacgctggctggctcattatgaatggcaaccgcatacagattaaacgccgacagtttgaacaggttattgataaattggacgcaatctaatgcaaatgagccttgtatgtgttatgatgaacacaagtcatatcaaggctctttccaacaaggaaaggagcagacaccatgaaagaaaaaagacgggatagcaaaggtcgtatcctgcatactggagagagccaacgaacagacggaaaatacttatataaatatgtagacgcatttggaaacacaaaatatgtgtatgcttggagattgacacccacagacccgacaccaaagggaaaacgggaaaaatcctcacttcgtgaactggaacagcagataagacgggatattgaggacggtatcgacagcacaggcaagaaaatgacgctttgccaactttatgccaaacagaacgtacagagggcaaacgtgaagaaaagcacacagaaacaacgggaacagctcatgcggttattgaaagaggacaagttaggtgctaggagcattgatacgataaaaccctctgacgctaaagaatgggcattacgcatgaaagataaaggcttttcctataacaccattaacaaccataaacgctcgttaaaagcgtcgttctatatcgccatacaagacgactgcgtaaggaaaaacccttttgatttcaagttgagtgaagtcctagaaaatgataccaaagagaaagtcgcattgacagaggaacaggaacaagccctactctcattcatcaagacggacaatgtgtatcacaagtattatgatgatgtgctgatactgttaaagacaggacttcgtatctcggaactgtgcggactgacagtagccgatattgatttccaaaatgaagttgtgattatcgaccaccagttattaaaaagcaaggaacagggctattacattgaaacgcctaagacaaaaagcggaacaaggcaagtaccattaagcagagaaacgatacaggcatttcaacgggttatgaagaaacgcccaaaggcagaaccatttgtgatagacggacggggcaacttcttatttgtcaatcacaaaggcaagcccaaagttgccattgattacactatgctttttgtccgtatggtaaaaaaatacaataagaaccataaggacaacccattgccacatatcacaccgcatacactacgccatacgttctgtacaaggctggcaagcaagaatatgaacccgaaagatttacagtatatcatggggcattcaaatatcagtattacaatgaactggtatgctcatgcgtccatagatactgcaaaatcagaggttcagcgtctaatcgcataagaagtatttaccacgattttaaccacgcttgatagcgaaaatataagaagatagacctagatatgtgaggtttaccacaaaagcaaaatgcccgtagagccgataaaataaggctttgcggacatttaagaagatataaaaagatagtcaaaaagacatatataattttagataatctttttacctttccgggcagcaaaaaagcggttagcaggaaaacagagtatatatctgctttcccctaatccgctcataatgtacggcagggttctaaaatcttttaattttctttgacggcgtcttctcaaactccgtctccctgacaatcaggctgtaaattcgcttatagaccggcatatccttgttaaacccgtcaatcagttcctgtagttttccctggatatccttgatatgctttttcttcgcgtactcgtaatccgggaaaatttccgcctctattatcttatctttttcccggaccaggatttcctttaccagttccgagcggctcagctcgttctccagctcctccggggatacattctcgccgttggcaaggataatcaggttcttgcggcggcctgtgatatagacgaaattgtcctcatccacataccctaagtctccggtcttaagccatccgtcctccagggtctcggccgtctgctccggcatcttgtaatacccctgcatgacgctggatccccttacccagatttcttcgtccaccaccctggcctcacagttgggaagaagttttccaacagaacccttcttattctcccattccagattggtgctgataaccggcgagcattccgtcatgccgtagccctgaaggatggtaattccgtattccctgaaacggtctacgtagtccggatccaggtaggccccgccgctgcatatgatccgcaggctgcccccaaaggcggcctttgccaccatctttttgggaatcaggcttccggcatcctttaactttccgtagatagactcaatgacaaggggcaccagcagcacaatttccggcttgaacagcttcatattgcgctgtacatgcataatggaatcattgatgcagataatcattcctatataaagcccctttatgatatccatggtcagacagtaaacatggttgatgggcagcagggtcatggacacggttcccgcaggtatcctcatgtccaggcagaccgcattgtccgtcaggttcctgtggctcagcatgactcccttgctctttccggtggtgcctgaggtaaagagtatggtgcagagctgaccgccggcaagctctgtctcatatgtaccggcatgtccggctatcagccgggacagcgagagcacatcccccaccgtctcccgggcctgcatggataccacgtgcctgatgcccggacatttcccgcgcacaacgcctgccacgtcagagcgcagttcatcgtacaccagcatttctacatccgccctgtttaagagctcacacacggcttctgcgggaagctgcgcgtcgatgggcactgccacgctgccgctgttcacgattccgaaataggtggtaatccactggtagctggtagtgcctatgaccgcaatatgctttcctttcatcccaagggcctccacggcacggcttacagccatggaatccaggttcacctcattgtaggtcttgtcaatgatttccttctttaccttgtaccggaatgctgtctgctctccataagcctctgcgccgtgccgtattatatcccttaatgtctctgctgccatatctgcctcctgccttttcggcctactctgcctgcagggactggatataagccactgcatccttcacggtctttacattgaccacttcccgttcctctacctccacgtcgaatttctcctcaatctcccccaccatgctcatgaagtcataggaattgaagcccaggtcctcaatgaaccgggaatcctccttaatagtctccggcgccacatccacatactcacagatgatctcttttaaatcctcaaacatatctttgtaatcctcctgcttttttatttcttttttaattctcttttttaattctctttcttgatattctctttttgttatattccgtctttgtatccgtcgcatcagctgttctgctgttttacaccatctctatgatttcccctaccgggcgctccgggtcttccacaccccggaatatgattctgcacaggtagtaataaatatactccagcttctccggcgtcaccacgccggtctggtactcaaaaccaaagtccaggccattgtcctctgccctgtggctcacggtgagatacagggtgtgggcagccacaccgttggaataacgggcagtcttatacttgatatcgcccagcttgtccaggccgggaccgtcatacttcatggccaggggctgataggtaaggcttaagggctcataggtctgcccgtccttaagcttataataatcatgcctgtaattgaaatactccgacgggctgtaacccgcatggcggaaatactggttctgggcatcccttattttgagcaggccctccatgaaggtatcctccctggacacaatggtcctgaaggggaaacagtgaatcctgcttccgccgcagcgcttctccgacagggtggcccgcctggaaatggtggtggtgacggaaacgtcgtcctggtcattctccttctggagataggtccgaaggcccattaagagaaggcaggtcatggaaataccgtatttctcgcaaaaatccagcaggcgtctggaaggctccccttccagatggaagttggtgatatttgcctccacattatcagatgtgttggtggctgccctcagcttcgggttgcgggcagcctttctctcctccagcagcttcttcggaccgtagatgtccgtgaaaatgggttcggaggaagcaatcagttcctggaaaaactgcctgtctttttcacaggccctgtttccggcctcgtaggccaaatccttttccagctgcctgatataggaggacatttcctttggatgttccacctcgtcgtaaaacctgctggcatacagttcaatcacatcccggaaaaacagaatcagggactgggcatccatggtcatgtggtccacgcagatgtaaagcccctggtacccatccggcattttgatcattacaatatggtgcatgggggaatcgtaccgctcaaagggaacctctgtccactccctgagcttttgctccgcgtcctcctccttccagccggtaaagtcaaagtgttcgatttcctttgtctcctccttcaccacatactggtagatgctgccctccttgtcatgggtaaagcgcaggcgcatggtatcgcagcgggcaatggcctcctgaatgcagcttttaagcacgtcccagtctaagtccacctggatggtcaggctggatccgatgtttaacacctgcttcttggggcagtatttcaggcagtaaaagtgaagcttctgcgctgatgtcagcgggtataccttgtagcctttccttgtcttcatactctgttctcctcttttccgaaaacccgggcaatcagttcctcaattgcatgttcatagcggtccgtatccttatagtaggcctctgcgtggctggctccgggtatgactaacagctccttgggcgaggcgcaggccccgtacagctcatgtaccatggaacagggcacaaaggtgtccctgtccccatggatgaacagaatgggaatacgggccttcattacctctttcctggcattgcattcatccaggccgtatccggcctccctcctggccatgcggtccgcaatctgcatcacgggaaaagccggcatatggtacatactcctcagcacatggctgaacacttcccaggcagaggtaaaggcacagtctgacacagcggcctttacctgctctggaagctccaggcccgtggacatcagcacggtagcggctcccatggaaataccgtgaagcatcagcccgcagtcctctcccagccgctccaccacatactccatccactgcaaggcgtcatagcggtccagacagccaaacccgatataggtgccctcgcttttgccgtgagccctctcatccaccaccatcaggttaaagccctggttcagataaaatttcgcaatggatgtgtagtcgttgagtccttcgctggtatagccgtgaaagcacaccactgccctcctggaaccttcacagcaaaagaatgtgccgtggagtctgagcccgtccctggatgttatgtacacatcttcctgaggctgtcctgccagccattccctgctggcgcggatacccggaatataagcgtcccagtccgtgcccgccatcttctgtgtcctgtcccgctttgcatttccccggaccacggtccggtggaaaaaataccgcgctatgccgtattctcccgctgctcctgctgccgccagtcccagcatccatcctttgattcccatatacctcactcctttaccgcggactgaccggctttccggcgccgcacacgcacctgcctacacaaacatctgcagcatcagagccttttccaggctcccctcaaccttcagttttcctgtggtaaacgcaaagaccgggtccagcttacccgacgccagcttcataagcgtatcggcggaacagataaactttgcgtccctgtcataatactcatacggctccaccctcagaacaccgtccctaacctctgcataaaacacgccttcaccctcgcccgtaatattgaactgaaaggccagatgctcctctaccctgctcacatcggccttcatgaaaatctcctttacctttgtaaatacttcttcataactcatactgactctcctttttcgtccgccgcgcagacggatataatatatgattggtaaaccctggactggtaaaaccgccagcccggaatactcccttttataacgccctcctccagggaaaatgtgatatcccccagcggaaaggccagccctctgccaatggccttggcatagctctccttaagggtccacagccggaaaaaccgttcccggcgctccgcctcagaccttcctgccatcacaaaactgcgctctgttccggaacacacgcgcctcatcagacccgccttaaacggacgaatctgttccgtatccgcgcccagcgctctgtccgccacagcgcagaccaccagaccctttgtatggctgatattaaattccacaccctctgcacccttaagacgcggttttgaaccggcttcctgctctacctcccaggtccgtccatattccttcataagaccaaagttcagcaggctcctgcccagtatatgttcccgttcccggttataaagactgccgccgggttcatatgaagccagataaatcatgacgtttcctcctgaaccttgtactcccgctttttcgaccagtggtcgaatcgaaatcaaactaaacataacacgttttcgaccgccagtcaagtctggcgttttcatttatattctgctatacttggatgtattctaaagaaaaaaccgaggattttttatgcaaaaccataataaaaaggacatgatactggatgccatgcaggaacttatgggttctgccaatgtccaggccatttctgtcagtgatattgcccaaaaagccggtatcggaaaaggaagtatctattactatttttcctccaagaacgatatcatagacgcagtgattgagagaaactactcccgggtcctggacgaaggcagggagctggccgcgtcctcccacctggatgcctttaaaaaactggaaatcatataccacgcctgcctggactcctccatggaattgagacgccgggaggaaatacacaccttcaatgaacagctggaaagcgccttcatacaccagaagttctcccgcatcatcatcaccaaactgaaacccatcctggccgacatcatccgccagggggtgcgggagggcagcatccagtgcagcttcccggaagagacagcccaaatcgtgctgactgtgctgaccatcaccctggataaccacctgattccctctgacgacgaagagatcgcccggattctgtctgcctttaccgagatgcaggaaaagggcatgggaatcccctcccacaccctccggttcctgatgcgcaaaatatgatatttatttccaaaataaggacttttcccccacttttggcggaaaaagtccttatttttatactttttccctatcctttttttccattctggcttataatatcaatggtttaccgggctggcaattgtttccagccctattgagatatcagcgcccattttcatatccatccacataacccgggcgcagagaggataaagaggactatgaaagatacactgaaacaggccgcccgaaaaaccctgctggtgatccgcgacataggagtcagtctcctgggcatcacaggatggctgttccacgcccttctggccgtgatcaccgccggattcatattaggtgccatcctgtgcctgctgatttacgccaaggtcaagccggatctggatgagtgccgagagctggcttacgacaagctggcccagatggagcgtacagatttctcaaaactgtccgataccgtgatttacgacaaggacggccgtcagatagggcttatcaatgccggccactaccagtatgtgggcatcaccggcatcagtatgaacattcagaacgcatacattgctcaggaggacagacgttttaagagccatacaggcgttgactggattgccaccttccgcgccggtctggcactggtaaagcacaggggacaagtcacccagggagggagcaccatcacccagcaggtcattaagaatacatacctgacccaggaacagaccttcacccgtaaaattgtggaaatcctgctggcccctgagattgaaaaaaagtactccaaagcagacattatggagttttactgcaataccaatttctatggccaccagtgctacggcgtggaagctgccagccgctactacttcggcaagcatgcggcagacctgaacgtggaggaagcagctgtcctggtaggcatcagcaacagtccctcggcctacgatccggtagcccatcccaaagcatcccttgaaaagcgcaacgacgtattaaagagcatgaatgaaataggcgaactttccgatgaggattacgaaaaggccctgtcaaagcccctcaccgtggtcaagcaggaatccgagggcacggacgagaattaccagagcagctacgccatccactgcgcggccctggagctgttaaagaaagacggcttccagttccgctacacctttgaggacaaggatgactacaattcctacatggaacgctatacaaccgcctacacggaaaaatccgacttaatccgcgccggcggcttcaagatatacacttccctggacagcagtctccaggacatgcttcaggcagacatagaccaggggctgtcctcctacaccgagctgcaggacaatggaaagtatgccctccagggcgcaggcgtcatcgtggacaaccggtccaactacgtggtggccatcgtaggcggcaggggaagcggggaccagttcaaccgtgcctatttaagcgccaggcagccgggcagtaccatcaaacccctcattgactacggccctgcctttgacaccggagagtactaccccacgcgcatggtgaacgaccacaaatgggaggacgggccttccaacagcggcggcaattaccacggcagcgtaacggtccgtgaagccttaaaccgcagcctgaacacagtggcatggcagatactggaggacatcggcgtggactacggcctcagctatctgggagagatggagttccagaagcttacatacgttgacaacggcgtgccctccctgagcatcggaggctttaccaacggcgtccgtgtggtggacatggctaagggatacagtaccctggccaattatggtgtgtacaacgaccggacctgtatcacccaaatcatccatgagcacgacggcgacctgaccaaggatttgccgcctgccgccaaacaggtctatcgtgatgattccgccttcatgctcaccgatatcctgaaaggcaccatgacctccccctacggcacaggacgcggactggagctggataacggcatgcccgcagcgggtaagacaggaaccaccaacagcagtaaggacacctggttctgcggctacacccgctactataccacggctgtgtgggtgggatacgatatcccccgcaagatgcccggcatatacgggagcacatatgccggaaaaatatggaaaaacatcatgaaccagatacatgagggcctggaaccctgggattgggagcagcctgaaagtgtggaattaaaggcggaccccagaacgggaacccaggattacttcagcaccaccgctgaattccgggcccagcaaagcctgcacgacaaggagcaggcaaagctgaccgcgcagctggaacaggatatccaggaattcaccaccagggaaatcagttctgtggaggatacatactcggttaaaagccaatatcaggatatcacctcccgccttccccttctggacgacggggagctgagggccggcatgctggagcaggtggaaaaccggtacgattactttaccggtattatcagccagatgggcgataccattgccctttacgaaaagcagaaggccattgacgatgccagggccagggaagaggcccaaaagcaggccgaggagaaccggaagcaggctgagaaggataccaaaaagaacgaattcctgcaggccttagagactgtggaggaactggaataccagcagaagaatgcccaggatctggtgcaggatgccatcggcaagctttccctggtggccggggacccggagcagcaggctctgtccgaccggcttcaggcagccatcacgcggatctccggcctgcccacagaggagcagtggaacgcatcccaggccgagagccgggcatccgaggaagctgccatgaagcaggccgagcagcaggtgcaggtacagcagaaccagctccgctcctccttaaacagcgagaaattcaagtggaacaacatggaatactacggaccaggaggcagaccggatgatgaaaattgatttacataaaaaaacagggcatacaggcgctccgcgtctgaagctgcccaaaaaggcccccgtggaacccgaaaaggatactgccaatccctaccgcatgccgcccaggcgctggttcctcacattcatgtgcatgaacatccccatcgtaggatggatttacctgctctgtctggcctttggaaaaaaagaaaaccagctgcgggactttgccaaggcttacctggtatataagctggtattcctggcagcggctttgatcatcctgggtattctggtatacatcggactggacctggcggataagctgctggcttatatggaaatgctgtaggtctgcctgtcaaataataaaaataaataaaacaataaaaaggttcgttctgaatctttggataacctaataatccaaagatcagaacgaacctttttccatccgtggcccagcctctatatggcttcttcacccgcagtttccaccgcctcagtttccaccgcctcagtctccgcagccgtcagtctctgcagccgctagtttccgcagccgccagtctccgcagccctgaaaagggccagctcttccttaagtgctgcaatctccgcctcgtaagcttctattttacggtccttttcctccagaatctttttctgttcctccacaatgcgctcaatcatactgcggtccatcattccctcaatgatgtccctcagcgcatccactgtttccccgggagtcttgccctcctcgtcaatggttatgtccgcatatttctcataataaggcacgcgctcattgtaaaggtcccgaagggtaaaacccggtttcagggcaacgccccggtccaccacattgccaatgcggttttccatctcctcatagctcatcttcagatagaccacttcgctgatttccttcaggtgctccatggccttctcaccgtatataacgcttccgccgggagcaatgacagagagggtcacatccagtccggcattgattctctcttccactttaaggaatccgtccataccctcctgtgcaataatttccttcaggagcctgccttccttttcctgtatcacgatatccacgtccacaaaggaaaatcccagcctcttggccagcagtaccccaatggtgctcttgcccgatgacggcatgcctatcatggtaatgttcggtttcacgcttttttcctccttgcagtccttttcttatcactctgccttttcaccggctttttcaccgaatatccaaagctccccagcttctttcccagctcaaagtactctccgtgggaatagctcacaagtccggatgcattgaggttgaactttcccctgtcgtccatgtactggttgtcaatggtcacccccatcaccttggcaatgaacatatcatggcttcccagctccttcacttccaccaccttgcactcaatgttcaccgggctttcctccactcccggcgccttcacatacctggatgcctggggggtcagccttgtctccttaaatttgtccacatccctgccggattttacgccgcagtaatccgtggcccgtaccagccgcttattcaccagattgatgacaaattctcctgtatccctgatgatgctgtgggaaaaacgttctttgcgtatggatatggacaccatagccggatccgagcagatggtgcccgcccaggccactgtgatgatgttaggtgtctctccctccctgccgcagctgaccataacagccggcaccggatagagcatgttgcctggtttccagtattcctttgacatatcttaatcctcctgccctgccgggccgttgtcctaatcctgctccgccagcatcagctccggaatcagctgttttttacgggataccacgcccggcaggctcagcaccggttccggcttttccgtggcttcctctatatccagatgaaaggccttggccgccagctgcaccgcgccctgcccgtaacaaatcaggtccgtggattccttcagtatgttggtcagcatgaaaaatgccatatcaaggctgttgctctccttggccttttccatgtagcccagcatcttgtccttcagggtttccagctctatatcgtttaacgacgtaatctgtcccacgccaatcagcgccttgccaacagaaaacttcttaaaatcctggtagaaaatctcttcgtcgcacttatccttaagattacttcccgccccaaacatttccatggcgtacttctctatatccaggcctgctatggctgccagggacctggctgccatctcatccaccggtgtgcaggtgggggagcggaacaacaaggtatccgacacaatagcgctgcacaaaagccctgcaatcttcggctcaatatccaccttgttttccatgtacatctggtaaatgatggtggccgtacagcccaggggctggttgcggaagaacaccggagccatggtctggatggttcccagcctgtgatggtcgatgatctccatgatttcggcgctctcgatacctgccacagcctggctcttctcgttgtggtccaccaggataacctgttttcccttggcgcccaacagattccggcgtgaaatcattcccagataccttccctccttgtccaggatggggaagtcccggtgccgtttgctggccatgacctcccggatttcatctgtataatcatcactgttaaaggttatgaggtgctccctggtcatgaaatagctgataggcatgctctggttaatcagacgggccgccgtatatgtgtcgtaggtggtggcaatgaccgtacatcccctgtcctgggcaatcttcttgatggtcatggacacgcctgcaccctcacacacaatgatgcagtcagcccccatctcgatggcgcagagctgggactcataacggttgcccagtataaccaggtcatggggttcaatgtaaaattccatcaggtccggattggcggctgcaatcagcacctttcccttgtcaaaatagacgtccgcatcccccaccacaatatcagcttccagtgtttcaatgatgttggaatactgggtatgggccttggacaagatgctgctgtcatatatattcatataggtctttgtgatatcgcctaccgtgataagcccctccagggtaccgtcgggcctgacggaaggaatggtcaccacattgttttcctgcatgatgttccatgccttttttaaggaaatgttatccgcaactcccctggtcttgcggatttcaatgtcctttacctgggttctcacgtcctccaccagcttaggctcctccatgccgaagtaatccaggacaaacctggtctctccgttcacatggcctgccctggccggaatgtacgcatcccctgtaatggcccgcttcaggttggcataacagatagccgaacagatggaatccgtatcaggattcctgtggccgatgaccattgtctttctctttaattcctgctccattttctctccttcgattctgcatctatggtaatatataatgtttcataatctgtttacaacaaattcacatttcgttcacatttattttttatactattttcataagagcaagtcacatatacaaatgataaatagtaaaattgcacatagatttttcataattgccccggttgttatacaatcggggtctcctcattttataaggcttttacgggctgaaaactccggctctatctttatactgtatacaagatatttcccgccatttcagtatatcagaccgtatttcttttttcaaccacaacctaaaagggacggcccttccgccaacatggcggaagccgtccctttccaaagctcagaaacaaagcttataaaacatcaaagctcatatacctggtcacaggtgaaatccggaagggtggcgctgctgtctgccttcttcgtctttttcccgttgtcatccgtatagtaaacttccctgtcctcaaccaaatagacataatccccatcgctcttataagccttctcattggtctgtaccttaccggattcattgaccaggtaatatttgccgtccacctgatagacctcgtactgggaatccccgtccgctgtcaccagcaaaccgttgtagtacaggaatccatccttttctccgctgaagccagctcccttgttggatcccgaggtgttgaaatagaaggtgcagcgtttgccgtcatcgtcagcaataccggtattcctgccggtgagcatcctgccgtcagtccccttttctccgaaatatcccaccaacacatggccgccggatactatcttgaccagtccgttccttctgcatccatactggttcacaaaataattttcgccatccacccggatggtggcggcattcatggtggagatgcctgttttaaggtaggcgggagtgccgttgttctcaaagtaataccactccttatccccttcccttggaagctcctcatcccccttctttaagatggctgccccgtcgtcggaatcaccgggatgctcagacagctgtttccactgtccctttgcaatggctccgtcgtccttaccgcccaggtatacgaaacggctgatgcctgtggcatcatcgctgtccgctttctccttcaccgcatgccagcccgtcagcatggcaccgttccggtcaaaatagaatttttctccgtgaatggtctcctggtcataattgccggtaagagagcgtttggccttaccgttattctgaaagaaaaaccaccgggaattctcatctgccttcttatattccttggagatatccccaatctcaggcagatcatcctcatcaaattccaggcatacccagccccgtctcatggcaccgtcgtccttgccgccaaggtagtagatattatcgccctcgtagaaccagcccgtgcgcatcttaccgtcgctgtcaaagttgtaccggccgtctcctacgttcttccagccttcctctgtcttgccgttcttgcccaggaaataccagccctcttcctttaggccgtccttgccgtctgtgtggacccaggaattcttcaccatgactcccttgtcgtccacataatatgtattctctatccaggtgctcttctcaatctccccgtcgctgcccaggaagtatgattttccgtcccgtgtcctccattcattggtcacatagttacccttgttgtccacaaatttaagaactccgtcctctgtcttccatccggactccgcacccaatgcagtgccggcagccatcactcccaacagcaatcctatggcccatcctgtcagtatccttcgtctggtcatatcctccacctccttatagtaccattttatcagaaagtgaaaggaaataacaggatgagaaaggggaaaaattgtgtaagaattacttaattttatttatgcgtgcaaataatctcacagtttacagctcaaactcgtaattgcatgaaaaggctttccctgatgacctttgtggagacgccgcttatgacggatgccgttgtaaatattccttaacagacagtggaaattatgtgacatcagtgatagaatgtaggttgcaatacaaaccttcaaaaacatttatatatctgaaacatttatatatttagaaaggagtcccccatatgtcagacacagccgtcaccatccgaatggcagaagaagcagacgcggccgccctcctgtccatatacgcgccttatgtagaaaagaccgccattacttttgaatatgaggttcccactgtccaggaattcaaaaaccgcatcacatccaccctgaaacggtatccatatctggctgcaatccgggatggacgcatcataggatacgcctatgcatcccaatttaaagagagggcagcctatgactgggctgtggaaacctccgtctatgtatccggggatgcgaggcgcaccggcgcaggctcccttctctacgaggcattggaaaactacctgagacgccagaacgtcatcaatgtcaatgcctgcattgcctaccccaatccgggcagcataacctttcatgaaaaatacggctaccataccgtgggacatttcaccaaatgcggctacaaactgggccagtggtgggatatggtctggatggaaaaaatgctgggccctcacccggaacagccggaaccttttataccggcaggcaggctttaaggcctgccttttctatctcatcatgtcttttacccatgaaggagtcaactcaggtagttctgtcccttcttttttacacttcctatattgctcaattgtatcacatatccaggcttacagctgtatatcgctatatgtatgggaagattatcaccgtcttttgtatctacagtacaagcggttccaaccaccttcatgttatcagatacaggtttaatctgttggcacatacaccggttcgcaagcagccccagcttatttaaaccatcgcaaattcttgagtaaattcaaatacccagcggaatcctgtttcctattccgccgggtatcattacacaatataatacgattgtattataaatatattttttctttccttctacgcctcccccagccgcccatatatcccggccagccgcctgcaccgcttcacagtgtcctcattcaaatcttccctgctcatcctccaccgccagttcttccccagggtagacggctcgttgattctggcagacgtatcgtatcccagataatcctggactggaatcactgccaggtcagccacgcttcccagcgcagccctgactaaatcccagtgaatctctccctccggtgtgtatccggctcctatgtactccctgacaaaatttctgtcatgttcatccagtgacgcgaaccagccctctgctgtatcattgtcatgagtgccggtgtacaccacacagttggaaccgtatttgtgaggcagataatcactgttctcaccggcgtcaaaggcaaactccagcaccttcatccccggaaatcccgtatccttcagaagctgtctcacagtaggggtaaggaaccccagatcctctgctatgataggcagcttgtccccgccgaaatgctcctgcatctgccggaatatttcgatacccggccccttttcccaacggccgtactcagccgtggcatcgccgtagggtatggcgtaatactcatcaaatccccggaagtggtccacccgcaccaaatcatacatgcgaaaacagtactccatcctccgcatccaccaggcaaatccagttttcctgtggtattcccagttatacagaggatttccccacagctggcctgtggctgaaaacccgtcaggcggacagcccgccactgcccccggcatattattctcatcaaactggaacagttcgggccgcgaccagctgtcggcgctgtcaaatgccacataaatgggaatatcccctataatccggatcccctgctcatgggcatatctcttaagggcatcccactgctcctcaaatttaatctgctggaattcataaaacccaatctcatccgtcagcatggccctgtatgcctccagtgcctccggttttctcagacggataccttcgtcccacagattccagctgcatgaatcaaaatggttctttaccgccatataaaaacaatactccctggtctcatcccccagtttccgtcccgccagctcatgaaccagctccggggaccggccttccttccagcgctcataagccttccttaaaagcgggaatctgccatcgtatatcttcttataatcaatgtccctctcatcgtttccaaagtccgcgtccaggcactcctcccttgtgagaagtccttcctctgtcagcttttccaaatcaataaaatatggatttcccgcaaaggccgaaaaggactggtagggcgaatctccgaatccggtggggcccagaggcagaatctgccagaagctctgtcccgctgcctttagtgtatcaataaaatcatatgcttccttagaaaatgccccgatgccataccgcgaaggcaggctggcaaccggaagcagcataccgcattcccgcatagtgataatctcctttatgtccggtgtgcccattcatttcatgctgtacgattattctgccgcataatcactctgccgcacaatcattctgccgcacagctgcactgccgcaatctgacaggccccggaaaataccgcttcattttatcacactttcatatcccctacaagtaaatctccccattcttgcggtattcccccggcgttttcccgtactttctccggaacagccggttaaaataggatatgttatcaaatccgcatctctgggccaccgccgtcaccggatccggggtggtcagcagcattcccgccgccttttccagacggaattcattgagatactgtatgaacggcacacccatatactgtttaaaatacttcataaaatgggaattactgtaaaaacagagctctgccccgtcctccacagttatcttttcaccgtagtgctcttccatgtattccagcagccgtttcatcctctccctggatttacggggctgccctgcggcctccgggccccaaatccctgcaatcaggcccaggaaccagaacagggttccttttacccccatctggtaggcatagttctttttcccgcacagctggtccaggatcccgatacattccataaaagccccgtaatccggcagacctcctgtaatatgaagaggctttccgataccgccctctgtcatgggacgcaaaaaatcataggtgcacaggtctgattcagccgacataagcatagaaggaagaaaaataatattttcatactccatcgcctcagagccgcactgactgatgccatgaagctgtccgggaaacaccaccacggcctcccccgcccttgcttcatacggctccatatccacagtcaccacaccccgtccctttttcaccgcaataatctccatatcctcatgccagtgaacaggaacctgcctgaaatcagccggaatagagcaggggtaaatgttaaaggggaaatcccttcccgcatgctcttttatctcatggtacccatattgctcacgcccgcgtcctctatactcctcacgcccgcgtcctccatattcctcacgcccgcgtcctctatattcctcacgtccgacttctccatatgccccattcccctgcatcccgctcctgtctctcccctgataaccgctctccgtgcttcccattttcatgccgtcctgcatccgcagaccacctttatcataaatttgatagtattgtactatatcatcacataattatgcaagattttcttttttcatcccattataatacagacaaacgtacaatcatgccgctacggcacaccttacggaggaatgtaaatcatgaatcagaaccaattggagcaaatgctgacagaagcgtgcaaaaaagacatttcaagctgcactgacaaagagctgtacacaggccttctctgcctggtaaataaactgtccaagggccgggaatccgcccggggaaaaaagaaattatactacatttccgctgaattccttataggcaagctgctgtccaataatatgataaaccttggaatctacagccaggtcaaatccattctggcaagccgcggcaaagacctcagtgtcctggaggaactggagcctgagccatccctgggcaacggcgggttaggcaggctggcagcctgtttcctggattccatagccacgctgggactgaacggggacggaatcgggctgaactaccatttcggcctgttcaggcagttattcagggataatcttcagaatgaggagcccaacccatggatggaaaacacctcctggctgagtaaaaccaatgttacctaccagattccataccggaactttacactcacctcacggatgtatgacatcgaagtcaccggctatgacaaccgcaccaacaagctgcatctttttgatgtggagaccgtggatgagtccattgtagaggacgggatttcctttgacaagactgatatcaggaaaaacctgaccctgttcctttacccggatgacagcgacagggctggtcagatactgcgcatttaccagcagtatttcatggtcagcaacgcggcccgcctcatactgtcagaggcagctgcaaaaggctccaccctttacgatctgcccgactatgcgatcatccagatcaacgacacccatcccaccatggtcattcccgagctgattcgccttctcaccacagagcacggcatggaaatggacgacgccatacaggtggtgacggatacctgcgcttataccaaccacaccatcctggcggaagccctggagacctggcccatggactactttaaagaagcggttccccagctgattcccattatggaagtgttggacgacaaggtcaggaggaaatttgatgatccgtccgtgtatatcattgacaagggcgaccgggtgcacatggcccacattgacatccactacggcttcagtgtcaacggcgtggctgcccttcacacagacatactgaaaaagaatgagctgaacaacttttacaggctctacccggagaaattcaacaataagacaaacggcatcaccttccgccggtggctgcttcactgcaatccccagctggctgattatatatcagaactcataggcgatggttttaagaaggatgcatttgaacttaagaaactggatgacagggcattcacagccaacataaagaccctgcaccgccttttagccatcaaggacagtaagaaacaggagctggcagactaccttaaggaaacccaggacattgacattgaccccaaatccatttttgacatacaggtaaaacgtcttcatgaatacaagcgccagcagatgaacgccctgtacctgatacacaaatacctggaaatcaaacggggcagcaggccggccactcccatcaccgccatctttggagccaaggcagcgcctgcatataccattgcaaaggatatcatccatatgatactctgcctccgtcaggtcattgacagcgacccggacgtaaagccatggctgaatgtggtcatggtaaataactacaatgtgagcctggctgaaaagctgattcctgcctgcgatatctcggaacagatatccctggcctccaaggaagccagcggtaccagcaacatgaaatttatgctcaacggagccgtgaccctgggcacggatgacggagccaatgtggaaatccatgagctggtaggcgacgacaacatctatatcttcggtgaatccagcgaaaccgtcatccagcggtacgcagaaggcagctactgctcccgctcctactatgaggcggaccctgaccttaaggaagccgttgatttcatcatcagccccgccatgacagcagccggttccgtggaacacctagagcgcctgtacaacgagcttctgaacaaggactggttcatgaccttccccgactttaaggcttactgccaggccagggaacaggctctgagcgactacgaaaaccgtacggcctgggccaggaaaatgttaatcaacatcagcaaggccggttacttctcctctgaccgtaccattgaggagtacaacagggatatatggaagttagatacgggtctggtaccataatttgtaataaaatcggaaagattttcataaaattttcaaagtcttatgctatcttatgtgttatactattacaatggtataatgaaacatcaaaaaggagcatagtcatgaaaaaactcattacggccacggcgcttttcctggcacttgccacagcgtccggggccgtcccctataatgcggcggataacgcattctccgcctatgcggtaggccccggcctcaacaacctgtccatcaaggacgacaaggcctcgtaccagtgggcccttaaaaatgacggccaggcgcaaaaaatagtccaggaactggatattgattccctggaccccgcctatgtacacagaaacaaaagaggaaaggtagacgccatagcccttcccccgctggagccggccaatatcctgaccagcgccattgatgctgttcccggaattgatatcaatatccagccagcatgggaggcctactcccagacagagacaaagcgccccctgaccgtggcggtcatagacacaggcgtggacatctcccatccggatttgcagggttccatatgggtcaatgaggacgagattcccggagacggcattgacaatgacggaaacggattcgtggacgatgtaaacggctggaatttttacagcaataccaaccaggtatacgaaggcccggaggacgtccacggcacccatgcagccggcaccattgcggcctccaaggataacggcggcatcgtgggaatagccgacaacaattacgtaaaaatcatgcctgtaaaggccctgggaggagaagagggaaagggttcaccggacaatgtgattgcagccatcaaatatgcggaggccaacggcgcccagatatgcaatctgagcttcggctcccagaactgcaccgaagaattcaaggcagctatccgcgactccggaatgcttttcattgtagccgcgggcaacggggatgacaacgcaatcggctataacatagacgcctcccccatttaccctgcctcccttccctttgacaacgtgataaccgtagccaacctgatgtttgacggcaaactggatgagagctccaacttcggcgcgggcagcgtggacatcgctgcccccggcacattcatcctgggcatcaccccggacaatggctatgccttcatgagcggcacctccatggccgctcccatggtcaccgccacagcagccatgctctatacctccagaccggaattgagcctgacagacatcaaaaacgtaatcctggcctcagcccgcaagatggacagcctgaacggcaaggtattaagcggcggaatgctggatgccaacggggctatgcagtggggacggcagtaaggcagacaggagcatgacaggaagtctctcccgtcctccgcgtcaggattcccgtatcttcattcctatagaaacatgtaatggtattgctgtcctggttcgcagacaaaagcatgtccttaagtaccagaatatctctgggagtcctgccgccggccttttctatctgcaccagatggagaaggccgttttttggatcaatcctgaatacagcaatgctgtcgtctccacggttggacacatataggaaacggccgtcctccgaacatttgatggctgcacaggagcttttatcattcggtgcgctcagggaggaaattctctgcaatatttggcatccctcttttaatatattcaccgcaaacacctctgaactcaattcacagaccacatacatcctgtgcgcgtttcccggctgaaacacaaaatgcctggggccggttccctttggcagcataatatcccgctccggcctatggctaagggtcatggtatgaacatctattccataaaataatatacggtccaggcccaggtccacacaccagattccgtccttttccggagacagaccgctgaaatgcacatggggtccttcctggcgcagggtgttgggtccttttcccttatgctgtctgcagtcactcatttcccctagacttccatccggcatcagaggaaacatggacaggcttccgctcatatagttagccgcataaataacccctgcttcctcatccagggtcacatggcagggaagggtgcccgtagttcctctggaattgagaatctccagagaattctcacggcattttatggcgcaaacgcctccccccgcattcccatgatactccatatcctccatcactgcatacatcatggtcccgttctgcgaaagggccagatacgacgggtttgatatacccggaagagccagttccctttccagtatttggctgtttccatccatcctgtatctgaaaataccattttcatccgcacccgcatatgttcctgcataaatcctatattccatcatacatccctccccgtaacctgtttgaaaaacattgttccaaaaagataggaactaaagtataccaaaggtagcaaatgcctccgtcgcgctcatgcctttctcaatagcctttcttacgttcttctctcctcttgctttttcaagggctttttcaatcacatattcaatatgctctgccggaataaccagaacaccgtccacatcaccaaagatcaaatcgccggacataacggttacgccttctatttcaatccggcagcggtaatccaccacctgggtgcgcacagaagaatcctgggcataacatcccctggaaaatacaggccagttctggtccagcacctgaggcgtatccctatgccatccattgacaactgcacctgccgccccgcgcttttttgcagtggccgttaaaagttctccccaatacgcgcagcgcatggtgcctccggcagccacataaatttcgtcctcctgcaagtcatccagcgcctctgtcaaataaccaaagggctttttctgctggccgaatacatcaatcattaaaacggtcatagcataacctgccagcttcatatcatccctaagaggccggactgcctgggggagaaactggtggtataatcccatctggtccagtatatcccctaccacaggagtatacagctctctctttataacttccagcaattcatgtttttttaacaccattttatatctcctcctttttaatccagaagcaaagttctgtttgccttatctcccctgcctcaagacagagggcgcttccattctcaatggcctttattaaacccgatgacgggtaactggtccatggctccagcgccaggttataagttcttccataccatggatatccataagaaccaccgcatacctgccacatccacatatatgggaacagttttccgtcccagctcattccataacttatgtttttagtttcattatgtacccggtaccaggcacgctccggaaaaccggttatataaatcatatccgcagtatcagcatcctcccccggcacgtttgaaaaatccactccattgccggcagcaggccattcaaacctggttcccggcttcagacgctgtgtctcaaaatcgcgctgatccatggaaaaacccacggtcccatttgtgtcaatccggcagctgctatccagaaaaggttttcccacggtggggtgatggccccacataagctccattggctcctttgccagattggtaaggctttcccggattgtgatggcgctttcatccctctttaaggatatttccttctccagacggaacggggagcgcagggtggtaatgcatgccttaaggacaacctcctcctcagaatcctttagaatcctgcaatcccacggcacacttgaaatctccccgtgcatccccagacaagcgcctttgtagctgcactctcctcctccgttgggaagtatctcctgccatcctcctgaattatggtccaggtaattccccagactgttcccggaattagacagatactcacttcttttatgaagccccgccggagaccgccacataaaatcaatatcctccggcttgtacagcatttccacacagtccatgcccctgtcagccaaaaacgtcagccgcagcttttgattttccatgacaaccgccttgttgccatccatgattatctggtctgtgatcctgcacccataattacggctgtacattgccactctcctttctgcgcacttggcaatgccaatatgcatccccactccgcaattccacttcccagcctttaataccgcagcagattttcactgtacccaccgtccacatacaatgtggttccggttacataggaggaggcgtcagaagccaggaatacggcaggaccaatcagctcatccgcacggccaacccgtcctatgggaatccatttttcaaaatccatggcctccaccagttcacggttcatatccgtaagaatggcgccgggggccagattattgacacggattccatacttggccagctccagggcagccaccttggtaaacatacctaacgatgctttagccatgcagtaatagccattttcccgcaccggcaccttctgatgaatggaggtcacgttgatgacggatgcccgcccggcctttttcaaagccggaagcagcttctgcagcaggaaataaggcgacttggtatttacattgtagatggcgtccattgactcctcctcagcgttttcaatggcgctgtgagtctcaaaaccggcattgttaatcagcacatccagtctgtcctccctggtcaggaaaggacgcagcattccgtctaacccttcctggtctctgagatcgccgtaaagatagtcaaatccattttcctctgcaatccttctggtcctgtcctcactgctgccatgaatccataccctgccgcctgcctgcttcactccctgtgcaattgcatagccaattcccctggttcctcctgtaatcaggacattcttatccgtcaaatcaaataactgcatatacagacctccttttatcttcctatccttccagccccattaactccgcccttataaatccaagagcaaaggccattcccgcatgccatgtatcctggcactgaatctgcggcgtatggtcaggaatcagaacaccttcaaagtgattcttttttaaaatctccaatgttctctttatattgatatccccgtcatccacaaatacttccgtataatccggaaccttgccccgtacattcctgacatgggcatagccaatctttccctgggaggaatactgctccaaggcatcatagatatttccatctgtcatctcctggatacttcccatgcaaaagtcaattccattgcagggacttggaaccaggtccagcactttctgatacagctgcggctggtagaccaggcgcggagtacctcttaaaaatggcataggcgggtcgtccgggtgcagggccatcattactcctgcctcctctgccaccggaagaatacgctccagaaaccattttagcctattccacaattcctcgtatccgatatcttctatgtattctccccgggcattctctgcataggtcatattccatatctcaccctttggaatcctggcatccagattgagctgtccggcatgaaaacaggtactgatcgctcctcctctggccttttttgttttttggtggccccacactccagcaagactgaaattatatccgaaacatcgtatgcctgcttttcctgcattgcgtataatttccttcagatgctccatctgttcttcctttttaggtccatccagcaatatatcataccagtccgccggactgaaattctcaattccgtaaatattaagccccttttcctttgcctgcttctggagcgccatcatgtggtccagactccaaacagactcccctgctctggcgattccgtaattttccttttcatccgtagctttgacaatatcattttctccatcgtagtaatttgccagatggataattacatccgagcatccgcactgtcttgcaaaggtaaattcctcatcctttagcatgtaacgatataatccgactcccagcttcatttccttcctccaagccactctcattaattatttctttttttcgtcatgtacgtgttaaacataactgcaaaaaacatcagggcgccattaatcacatactgcatgaactcgtttacattcagcaatgtcatggcgttggtgattacacctgtaaatagtacgcctatcaaagttccccatatggttccaataccgcccaacatactggtaccgccgattactacagaggatataatctgcgtctcccagccgcgtccaaaggtaaatgtggcagaacggacctgtgcggaattcataatacctgacaatacacacatcagctgcaccatacacatgacaaaaatcctggttttccacacactgattccatttaaacgggcagcctccgcattacctcccactgcgtaaattcttcttccaaggtcagttttctctgtcaggaaccaaaaaaacaggaagattaagataaagacaatggcgggaaagggtattcccagaatccttccgcttcccagaaaggcataccaggttgggaaggcattggcgataggaaatccgccgcacacgatagccgcaaaaccatacatcacattcagggtagccagtgtgataatgaaactgggcatattaaatttctgtctggcccatgcgtggaacaatcctgtcaagagagccaccagggtggctgctgcaattcccactaacgcgccaagctcaatgggcatgattcctgcctcagcaagtccctttgagataaatcctgccagcactccgcttaaggctacctgagatccaacggacaggtctatttcacctgaaatgattaccagacacattccgtaagcaatgacacccttcatagccgcattccgcaatatgtttaaaatatttcccgatttcagaaaggacggcgccgcaatacttacaccaataatcagaaccagcagaagaatttcaatcaggtggtccagaattaaattttttgtttttttgccggaaaacagttccatatgcaatgagtcgatttttacagatttcattctacctttcctcccatacaatacgcgtataatgcatctatggtcacatggtcgtccagacacacttccccaacgatttttcccatatgcataatcagaatcctgtgacatacctccaccagttcctccagctctgatgacacaaaaatactggatattccttttctggactgctcccacataatctggaaaatctgttgttttgcttttacatctattcctctggagggctcatcatacatcataatcttgggagccgtattcaaccagtttccaataattaccttttgctggttgccgccggaaagagagcttaccggggccatcaaatccggaattttaatctgtaaatccctaatctgtctctcagaaaattcttttctggttttttcatttatcacatggcgctgtgtcatcttatccatactggcatagcagaggttatcacggatggaatgaatcaaaatcaccccctgcgtttttctctcttccggcgtcagccccagccccatctgcatcattccgatgggaccggcatttttgggagcagttttctgatccaccaggatttcaccgctgtcgtatgggtctgcaccaaatatacagcgcagcagctctgtacggccggaccccagcattcctgcaattcctaatacctctccctttctcagctgaaaggatacgtcctggaacttccccttgcgggtaagatgttttacatccattatgatgccatcctgcaccttaaggtctccgggtctttccttgatttccacatcaccgaacatcatagtaatgatatccttgtgctgcagcgaactgattggctctgttcctatgtattttccatcccgcagcactgtaacgctgtctgcaatctcccacagctcctgtaatctgtgggagatgtagataatgattacatcctgcttttttaacatccgtattgcctcaaacagcttctgggtttcattggcggccagagccgatgtgggctcatccagcataagcaccttcggtttaaagctcatggccttggtaatttccaccacctggcactgccacatactgagcctgaacaccttttcatgggggtcaatatctacgcccattgcatgcagcagctctcctgccatctgatacgtcctcttccagtctaccagacgtcccttctttggaagacgtcccaaaaaaatattttccgccactgagagatggggaaccagactcagctcctgatatacagtggcgattcccttgttcagtgcttccaccggtgtactgaaatgcaattcctcttcatccagataaaaatgtccgcttgtgggctgaatggcgcctgcaaatactttaaccagggttgattttcccgacccgttctttccgataaaggcatggacttttccgctgtcaaaggatacggtgacatcatccaatgctcttgttcccggataatcctttataatcccttccgttctcaaaatgctcatggcatactccttattcttaccggtaacgaactcagctacattttggatttaaggtctgacataaaatcatccagctgctttgtatcgccgcgtcttaacggtataccttccacaattactgtctttccctggtccgccacatcctttccttcaatggactggaccagtgtctcaaccgtcttatatccaatttgaaacggatcctgtcctgtgacggcctgaagaatatcattatctgctttcagcaaatccacaatctgctcagacgcgtcagtaccgaatacaaaggtcttgcctgcctgtcctgcattttccactgccataacagcaccgatggttccaccgtcgttggcagcaaacatgatatcaatatccgggttggcggccagcatgtcccctgcctttgcaatggctgtatcctggagccatgcatcctggttggaaacaatctcatagtttaccccgccctcatccagggcagcaaggaagccgttgaccctctcagctgaggtttccggaatttgtgtcttaaactgaaggattcccagctcgattttctcatccccgtatttttccttaataaagtctactgcaatctcgccagtctgtttacagaaggcataattatccgaggtataggctgctatggaaaaagggtatgagtccatggccgtattggccacacagattttgacccctttatcgcttgaaaccttaagtgcctccggagaaatcgttgcggacagaggggagatggcgatgccggcaactccttgtgctgtatatgtatttaccagctcagtttccttcatctgatcatttgtgacattggaaagctggatttcataccccagatcctttgcagccgcctcatatccagccgacatcagcttaaaaaactgatcttcctggaacacaatacctgcaattgactttcctgcaccagatgtatctgtctgctcttccccttctccggccttctctttctgacctttctcttcctggcttgtcccctgggccacggttgttcctcctgttgtcttggctgccccgtctccatccatgctgcatgcacccaatacaccggccattcctaatatcattgctgctaacgctatcttcttcataaagcctgcctcctaatatcattacatagtttttgttttcatttaaatgagctcattcatttatgttcttactatatcttattttattccccaaatcttctttacttttgatatttattgttttatattgatatttagacaaaaacaactggatattcaggcagggagaggaactattcttatgcaaatttcagctaaaaatgtaaatactccatctgtattccccattgattgcgaggtctattactcaatccgtacactgattgatgcaaatgaatacccgcaggtccatgatttttatgaaatcatactagtgactgaaaattcactggatattttgttaaataatgaccgaatcaaacttgggcatggaaatctgcttcttatccgtcccggtgatatccacaccaaaatacagaccggggactctgtacatattaatctggcctttccggcttatacggtaaattctctttttggttacctttataactctcaggccccgcgcaaagaactgtttgctggttcccactccccgattgtccggttaagcaccattgacacgctgatgatccaaaatcgtttgtcctttcttaaccagctgtcatcttctgatatggaggaaaaaaacacccatctcagagcaatccttattgacattatgtattcctatatcattcctgaattggaaaaacaaaaaaggtcctcggatgcctccaatctgccggcctggcttgttcctgcactggagggattatccaatcccaaaaacctgaccatggggatggattatcttgtccgccagacacagcgttccccggaacacatctgcagaatgttccgtaagcatctgggaatcaccccctctgcctacatcaacggaaaacggcttaactatgctgctaatcttctgatacacacagatatggagattgtagacgtaatatatgaaagcggctttcagagcatcaattatttttatcatctgtttaaaaaagagtacggcatctcccctgtaaagtacaaaaagatccatctggtccagaaactttagaacctgttcccgccgggcacgcaaaaaggcagcctccacatctgcaactgatatggagactgccttcttttatttcatctataactgcaattagaccggataagccttgctgtccttgtcggcagcactgctgtccaccttggtctgctgggcagccctgtactcgaagaaatccttggccactgccgggaacagcgcatagctgagaacatcctcatcctgctgcttccactgcgcgcattccttctcaaactgaggaagctgaggagcaatcaggtcggcaggacggcaggtaatgggtgtctcgtcgccgataatctttttctgcacttccggattaaagggcttaactgtctggccgaattcaccaagcatgattttcttggattccttcggaaccatcttatagcgctcgcccatgataacgttcataacagcctgtgtacccacaatctgggatgacggtgtaactaacggaggctcgccgaagtccttacgcactctcggaatctcctccagaacctggcggtacttgtcttcctgtccggcctcttttaactggcttaccaggttggacagcattccgcccggcacctgatactgaagtgtcttgatattaactcccagaaccttcgggttcagaaggccgctcttaagggcctgctcacgtatgggctggaaatggtctgcaatctcagccagcagtgtctggtcatagccggtgtcatatggggtgccgcggaaggtctccaccataacctcagtggccggctggctggttcccagagccagaggcgacatggcgcagtcgatgatttcacatcctgcctctactgcctttaaataagtcatggaagcaacgcctgatgtgtagtgggtatgcaggtcgataggaaggcttgttccttccttcagagcctgtaccagctctgctgccgcgtatggtgtcagcagacctgccatatccttgatacacagggagtcagcgcccatgtcctcaattctctttgcaatatccttccagtaatccagtgtataggcatcgcccagagtatagcacagcgcaatctgagcatgtcctttttctctgttggtggcttttacagctgtctccaggttgcggatatcgttcagacagtcaaagatacggatgatgtcaataccgttggaaatggacttctgtacaaagtactccactacatcatctgcatagtggttatatcccagaatgttctgtccgcggaacagcatctgcagcttggtgttcttaaatccgtctctcagtttcctcagtctctcccatggatcttccttcaggaaacggaggcaggaatcaaaggtagcgccgccccagcactcaaccgcatggtagcctaccttgtccatcttatcaataatgggcagcatctgctctgtggacattctggttgcgagcaaagactggtgggcgtcacgaaggacggtttccacaatcttcactggcctcttttctatctctgccatagttataatcctcctcgttatgagcatttggcgccgtctttaaggcgcttgtgcgatacatgccgcccgcgcccgtccggtgctttcacaggccaggcgaaacggctgtcattgtcaatatattatgccattataccccaaatattgccatgaaggtaccggccgcaactgcggtgccgataacgcctgcaacgtttggtcccattgcgtgcatcagcaggaaattggtcgggtctgcttctgctcccaccttctgggatacacgggccgccataggaactgcggacacgccggcagaaccgataagcggattgatttttcctcctgtaatcttgcagaggagcttgcctaaaagcacaccgccgatggtgccgaagataaatgcggtcaggcccagggcaacaatcttgatggtggttacatttaagaatgcatctgcgctggtggtggcgcctacggaagtacccagcaggataaccacaatatacatcagggcattgcttgccgtatcagccagctgcttcacaacgccgctctcacggaacaggttgcctaacatcagcattcctaccagaggtgctgtggatggcaggatcaggcatacaacgatggttacgatgatggggaacagaatcttctccagcttggatacaggacgaagctgttccatcttaatcttacgctctttctcagttgtcagaagcttcataaatggcggctggataattggaaccagcgccatgtaggagtaagccgcaaccgcgataggtcccatgatctgggtctgtcccagcttactgcacaggaacagggatgtagggccgtccgcacctccgatgatggagatggctgctgattccttgccggagaaccctaacaggatggcgaagaaataagcagagtagatacccagctgtgcggcagctcccataaggaagctgattgggtttgcgataagggggccaaagtctgtcatggctccaacgcccaggaagataagggagggcaaaatgctccactcatccagctggaaaaagtaccacagaagtccgcctgttccgttggacgtctgttccggagaatacatgatatccggataaatattaaccagcagcataccgaatgcaatcggaatcagcagcaggggttcaaatcccttcctgatagcaaggtataagaacaccagggccactacgatcattacatagttgcctgctcccagatggaaaaacgccatctggttcagcaggttgttaattatattgccaaaatccataatgttccctccataatgaatcccacattgctatgggctcatctctataattagttcagagtagctaataccgcgccagattcaacggaatcgccggtggacgcattaatgctggcaatggttccatcctgaggagccacgatgtcattttccatcttcatggcttccagaaccaggattacgtcacccttcttcacagcctgtcctaccgctgccttaacagccactaccttgccaggcataggtgcggatacgctgacagaacctgctgcacctgccggagctgctgcaggagcaggagctgctgcgggggccggggctggtgcagccggagctgctggtgctgccggggctgctgcaatgccggatacagcgccttcttctacggttactgcatatgctttaccattaactgtgattgtataattcttcatgatttcaattcctcctgaatgaaaatagttatggaacgtttcccgtcctcttatctgcctttagacctctgtacacggcggatggaacgaaccaccagtccgttagaagaagttccctcatatgctgcaatggctgccgaaatcactgccaccagctcggcgtcgcccatcaggtcttcgcctgccgcaggtacaggtgctgccgccttaaccggtgctggtgcaactggtgctggcgctggcgctgccttttccttctggcctgtctcccacttgtgaatgaacttaaagcaggcaatcagcaggctgatgaatataaggaccgcgaacacggtgccgataccgattaccgcatatacggtagctgtttccatcagctgcccgatggtcttgccctcttcttcatttgaagcaagctcagtgaattccgcatcaactatctgctgggaaatcatattcagattcatgacatactgcatggaaccttcggtgaatgcaacaggcagcataacggtataggtaccatctgccatctgtaccacgcttgcgtcttcaatgtcgatgcttctgacttcccccagttccttccttgcattaatctgctcttcacagatggctgccataactgcattgccctgggcttccgacatgaccttctgtgcaatcagcccatccgtgctgacgcccagagactggaccgctgtcagcttggcatactctgccatcatatcatctacaggagttccgtccgtggcaatccggggagctgtcccggcttcatcctgttttgctgagcaggctgacaggctcaacaggcaggcggccatcagaactgctgctgccactcgtttcattaatcgtctcatatacctgtcacctctctttaaaccgtgccatgcttcttagacggacggtcctctctctttgtgaacagcatttcaaaggctgcgattaccctctgacgggtctcccctgccttaattatgtcatctacatatcctctcttggctgctgctacagcgctggactgaagtgcggtgtactctgctgtcttttcattgatgagtgcggcggcatcaccagatgcggcgatttcctttgcatacataatcttcactgcctcagacggattcatcataccgatgacagcaccaggccatgcatataccacgtcagcgccgatggacttgctgcccatggtcaggtatgcgcttccgaatgcttccttaacaattactgttaccttgggaacgctggcattggcataagcataggtaaggcgtgcggctgcctttgcaatccttctctcgctgcacatcttggccttgtagccctttacgttcaccagtgtgagtacaggaatattgaatgcgtcgcagaaatgaatgaaatcagttgccttgtcgcagcccttgccggacaggacaggctcaaatgtttccttcttctctccgttctcatagatttccgtgcggttagccacgcatccgatggttgtcccgttcaggcgtatgaaaccggtcaccatggaaggttcataattcttcttaacctccatgaagaagctgttatcggatatcagtgtcagggccagagccgtgtcaccagtgcatccctcgatattatcgcagatacggtttaagtcatcctggcactctccgtatgacatatcatcctcgttgttggccggaaggatggaaaccagggcgcggatctgagcgataatggaagcctcatctcctgtgaagtctgccagtccggattccctgctctggaaatctgcgctggaggtatcacacttctctttataattgccgtcaatggcgttaggtgaattaacaaacagtttgccggacttctcttccatgaaggtgaaatctgtgatgccggcagatactgccatgccgccgccgcaggttccaaagattgctgttatctgaggaatcacgccggaagccatggtctggcttaagtacagcttgccgaagccgtccagggcatcggtcgcctcctgaagacgcagacctgcacagtctaccaaaccgattacaggtgctcccatcttcatagccatggaatagatgttgcagattttctttgcatgcatttcgcccatggagccgcctaatacagacgcatcctggctgtatacatacaccaggcatccgccgatggtaccgtagccggtaaccacaccgtcagcgggggtctcctgctcagtcatgttaaagtcagtgcttctggccgttatataggctccgacttcaacaaaactgttctcatcaagcagggctgctatgcggctgcttgctgaagtttgtgctgaattactcattttccagtcctccatcattcataagtttaacaatatctaagcaacggaaaacccattctcaggcccgtcgcaaaaaaaagcagaaatattgccacatacaattataataataaatttgtcaaatagcaagctcttttccactaaaaaggtgaaaatattaacgaaattcaagattcgtaaatacgaaaagagctgtggctttcacgaaatatgtgaaccgccgcaactcttttttgtcacaaacccattatttacttaacccatggaaaaaaacttgtcatgaatgacctgtacggccttttccgcatccttttcatccaccagtacggatatcttaatctcgctggtggatatcatgttgatattaatgttggcgtcgtagagagcctcaaacaaggtggcagccacgccaggatgattaatcatacccgctcccaccacggaaaccttggcaatatggctgttggtctccagatggccaaagccaatggactcctgatgctccttcaggagcacggaagccgcctccaggtcggactgggcaacggtaaagcatatgtccttgccctcctcatggccgattccctgtaatatgatgtccacgttaatgtggttctgggccagcagggaaaacaccttaaaggatgtgccaatctcattgggcacccctatcagggcaatccttgcgatattaacattcttagccacactgctgatatatgatttctccatgcgttttgcaacctccttcacctttgtacccggatgccctgtaaagcttgagagcacctccagcttcacattatatttctttgccatctccacggaacggttgtggagcacctgggcccccagggtagccagctccagcatctcattgtaggtgacctcatccagtttccttgcgtccttcacgattctggggtcagccgtatataccccgtccacatccgtgtatatctggcacaggtccgcccgaagggaggcagccagcgcaaccgcggacgtgtcagatccgcctctgccaagggtggtgatatcctcatagcggttgattccctggaatcccgtgacaatcacgattttcttctgattcagctctgtctcgatgcgctccgtatccaccttcttgattctggcattcctggccacggtattggtaaccattcccgcctgccatccggtcagggaaataaccggatatcccagcgcctccactgccatggcgcagagggccacggacatctgctccccggtggacaagagcatatccatctcccggttggaggcaaggggattgatctcatttgccttctcaatcagctcgtcggtggtatccccctgggcagacagcactgccactacctggttgccggctttgtatgtatccgtgataatttcagccacatggcgcagccgggcggcgtcagccacagaggttcctccgaatttctgtacaattaagcccatatgttattcctttcgtccatacattgtatcccgccaaaaagcggcggccccaaaggccgccgccagcaagcgcttatatttaaatattttacacgctggattttgtttgtcaactgaatccggccttaactgttatttctccaggttcttccacttaaagttgggaaccacatccgaccacttgctgatgccgatgattggctttgcaaattcagtggcctccagggtggcgttcttcttgtcgatatcccggaatacctgccatatcttcttgcgcttggtagccacaatcagattaggctggttcatgtcgcactcccacaaaccgaattttaatccgtcctttgcctcggagggcgcgtctacctgacggctgaccgtgtaggcgtcaatatatgggttgctgtccaccaggtaataggagtaagcataggccgccgcctgaatctccggaatgtttcccctggtagggctgtaggatgtgaagccctgctccgtaaggatgatgtggcgcacattgcctgcgggcgccctcagggtatcctgtacaaagtaatctgtcagcacgttcagattggcaaaattgatgaccggtgagttaaagtcatttgtgaacagccctgtggactgcggatcatcccagaattccggctctgtcatggggcatggatatggatggtaggccagaccccagtccatctgtccctgggtgttggctatggagttaaagctgtccacaatctccttgcctccgtacttaagcttgccgtcaatctcgttcatccagttatagtccagtgaaaaatatacccggtcgttggcattggtgctcttgatggctgtgtagatgacccggaatgccttctggtatgccttcacataattcgtcaggtccatgggccccatgtaattccactgctggttgttaatctcgttgccgataatccagtttgacaccttgccgtaattaggattgtcgccgctgtaatgctgggccaggaaggacgcgattgccttggtctggtcaaatccggcctcggtctccgcgttgaacatgtaataaaatgcattggaattcttctgtgtgcccggatacaccaaatccggtgtattgggattccagtcattaagcaggataaccgtaaccgtcatccccttgttggacagcgcgctgatggtcttgtcataagcgtccaccacgcctttgttaaaatggtacgtctttccgtcatactggtaatcaattccggttcccataatctgggaaaatgcgatattggtggtcacatgcttcacgcccaggtcaaaggcgtcgctgagcatgtcaatctcaatcacaagacccttcttagtcagagggtcattaaaaggcgtctggttcttagcaatcagctccggattggttatgtagtggggctggctgaccttgatgaacttagttccgtcaaatacagccaggacaaaccggctgtaaagcttatcctgcggtgtgcccaggttcaggggcacgcttaccgaggcagcgcttaaggcaggtgaggaagcaatgaaattgctgcggcttcccagctcttcctcataaggctgcatctcaaagacgtagatgtttccgtctgttcccgtcacatccccgctgctggaaaatccaatctcaacgttctgtttatctcctgaaatcttacaggaggtaatctggcctgccactcccggcgtgaatacctgggcttctgcctgggcgcctgcctgactctccgcctgagctgcggccccaaaggccgtaaaacttcccaggaacgccgcaccgtacagcagggccgccgccagggtcagggccttacctcctttaacgaatggtttcttcatttatgaattcctcccaactttctccaaaataggatacatgatacatcatacataaataagtttactttttcaatgaactttttattacatgtctcttaattatatgaacaggaatcataccttcccgctgtgttccaaaacgcctgcagcatcactgtatctgagtcagatagattgccgtaagagtatctggaaacgaaaaaatgcagaaaaacagggaaggctgcctgtatgtgctacttacaggaaaccttcccttccgctaattcatagagcctgtcgcacacggacgacagttcgctttcattgggggaacagtatacaacaccgattcccctgccctttgcaaattccagaaattccctgaccgaatttctcatcaatatgtccgtacccgaaaacagattatctatgacaatcagtcttgccttggctataatccacttatacaaagccacattcagctggcacctgtggctcagagtctcaatgggccgtttcagctcttcctcccggatatccagcagcgccagataatcacaggcaaccgcctgttccagcttctcccgtacccccactccgggagcaaagtattccaaaccggcaatggtcaggttctcggccacatccagctttggaaaaagactcttcttgtaatcctcaatatatccaaaaccgtatctgaccatgttctttcttccacctgccagctccacctgacggccagccagccacgcgcttcctgattccaccttgagctccccgctgagaaggcgtacgatttcccggcagtatgtgtcatccggatggatgaaacccaccacctcgccgggacacacatgaaagctcacatcccgcagttccgtggcccgcacctcccgcacagacagaagcataccgcgccctccgggttctgcctgggaccggatgatttcccgccccaccttccggttctcaccgattataatacggtcgatcatctgccggtcaaattcctcccggtacaatacggctgccagccgtccctttctcaggacagccagacggtccgctgcgtccagcatgatctccggccttgtatctatccacaatatggatattcccttctctttcagacgtatgaccagcctcttcatatactcggtttccttctgtgtataatcccttgcaatcccatccagtatcagtaccttcatgccggcacagaaggccctgcatatttctatggtatggcgctccatcagactcagactggccaccggggcctgaagcctgcaatcaacctccaatgctttaagtgtctccctcatgcggatgattccctgcctggccggaaaggacatacagccctgtttctgcagcaggcacagattttcctccacagaaatatcattgatgaccgatgtcctataccgcacacagaaaattccggcagtctgggcctggctgatggatgtaaatacagccggtctgccgtccacatacatccttcccctgccttttgacgtcctgccgctgatgatatccgccagcacggatttgccgcttccgctgagccctgcaacgcaaagcagctccccctggtacagggaaagactgatgtcctccagggcctttatatctccataggtctttttcacctcatccagccgtatcttttctatcctcatgactcaccgccctttgaatccgcggctgctggaagaatgatttccacaatagtgcctatgcccgccgtactgtacaccttgattccataatcatccccgtagtagaatttaatcctctggttcacgttgggaagggcgattccggtatttccccgcttttttaagtctctgtcctgttcatagataaacctgcctttggacagcctttccctgagactgtccatctgctgttccgtcatgcccattccgttgtcggcaatgcggataataaagcgttcctgtgtactataggcgtacacactgacctgtccccctcctacctttgtctccagtccgtgatggatggcattctcaatcacgggctgtatggtaagcacgggaagcttgtactgcagaagttcctcatcctctattctctgctgatacttgaatttccccggaaagcggtatccctggatcaccagataattcttcacattatccagttcatctttaagagtagccatctcgcccggcctgcttatgctgtatcggaacagcatggacagcgactctgccatctgggctatgtcctccgaatcccgtatgatggccatgctgcgtatggtatccagggtattgtaaaggaaatggggattaatctggctttgcagggcatgaatctccgcctgggatgccagcatctgggaggtgtattcattctccactgactgctttacatattgaatcagacggtgtatgggccttcccccttctaaatccgccatatggcgctcaggctgcgcaatcatctcagaaatcttctcaatctccctcagcggtcccagaaaccggatacagaacaccgccagcatcactgcctgatatagaaagaacaggaccaccacaaaaattcctgtcctggtccttaacaggccaaaaaacaggaaaagaaacagcagaaccacaaatatacggtctgccagcagcaaataaaaataagaacggttggtctgcagcttgctcatcataggcaccatccatcaaacatagaatctgcggtattctgttggtttcacaccggtcatcttggaaaaaagcttgctgaaatgccgttcatcctgatatcccaccatacaggcaatctctccgatggtcctctcaggatttctgagcatttcctttgccttgtcaatacggacatctatcagatactgggtgagagtctgtcctgtctccttcttgaacatggcgctgagataagcgggattcaggaacacgatgtctgctatatcgttcagcgtaatgttctcgctgtaatgctctccgatatactccttaatcatccgcaccggacggcttcccatgccgtccttctgtctctggcacagctcgcagctcacactgacgtaatccgcccacaccagcttcagctgattcaaagtagtacagttttccaggcgcctgatataaggctctgcatcgggaatctcatagtccttcatgatatccgaaaatacaagaccggtcctctcaagcatctcctccaaaaggccgtaaagcctgtaataccggtactgcccctccaccgccctgttcatggcctcctcgccaataagtacaagctttccggccgccagaagagggacctgccgttccatcttcacctcaaactctttgggaaggggataagaatccttcttataattctccggcaggcggtcatagcggattatatttcccactcccaggtcaatacgcagcattacggacttaacggccgtttccagggaatacggcagatgttccagggatgaaacccggctgccgattcccaccgtcatctcaaacagatcgtttttatattccgtacgttccagcatctcccccagctcggaacagatatggtccagggcaggttctccgccatcgtagttcaggcagatatagccccaggaccggctgatgatgaattcggtttcatgacagcaggccttaagctttctcatgattttagcagttatggtttcaaccgcctgttcaggcacctggtattcggaatccgacacgcagtccagcttgactgccgccacggtaaagaagctgcctctgtaatcaaaaatatcattaaccttcccggtcccaagggcctgcctgaacagctccccgtcccccgtcagaaggttctgcaaaaggttcttccgcagtatcccattgttggatgccagcctgtcctccataaggttgaactgcatctgctgttctctcctgctggccctctggctttccagcttggccaggacatcattcagctcatccttcttaatgggctttaacaaataatctgatacaccatactgaatcgcgcttctggcgtactcgaattcactgtatccgctgataattacgaactccacgggaatctgttcttccctcacatgccgtatgagatccattccgttcattcccggcatcctgatatcggttatcaccacgtctggtttcagctggcgcaccatttccagggcagtaattccgtcccctgcttcccctgcgatttccacatctgtcttttggcggtcaatcaggctttttattagcaaaataatattaatctcatcgtcagcaatcaaaaccttcaacagactcgtccctccccagactattatccattcctggccgcccgggtggatgcatatccatccagcgccactgcaaacaggatgaagataccgatgaccacctgatgccagaaggtattaacattcagcaggctcagaccatttttaatggttgccatgagaatcgccccaaaggcagtgcccaccatattcccctttcctcccgacatgctggtcccgccaatgacagtagctgcaatggcgtccatttcatacgcatttccggcctccggtacagcggcctcgctcctggatgccagtatcacgccaacaatggcgcagagcaccccgctcagcatgaaaacaagaatctttattttatccacattgattcccaccagcttggctgcgtcctcattgcttccaatggaaactgtgtatcttccaaactttgtcttatagaaaagataataacacaccaataggataatcagggtgagaataattggaaacggaatgaccccgatatatccctgacccacaaactggatttccggatacttgagaccgtagagcggtattccttttgtatacacataaatcaggcccctcagtatgctcatggttccaagggtagcgataaagtacgcaatcctgagcttggtcaccagaaggccgttaaccaggccgatgaatgcccctaacaggattaccacgcctatcgccagataaatattgtaaccgcccagtatcatggcagccaggaccataccgctgattcctaccgtggagccgacggacaggtcgattcctcccagcgagatgacaaaagtcattgcaaaggccacgatagccgtgtaaaccgcctgccgtattccaatcatgatattggagaatttcaggaaattgggacatgcaatgctgagtccgatgaacaccaccagatacatgcctatgattcctaccccgtttacattgagtacattttttaatgctttacttttcatatgccctccattatatcagatataagatttacaatcaaatacagctacacggagtaatgcttgatttcttccgttgtggctgattttgcatccataaccctggttacccttccctgtttcatcaccaggattttatcacagatgcccaggacctcctcttcctctgaggacacaatgacaacgccttttccggacttcacacattcaccgatggcttcatagacctctgtctttgcattcacatcaattcctctggtaggttcctccagaaggaatacgtcccctcccatcatcatccacctggctaacatcaccttctgctggtttcctccgctcaatgcgcttatgccctgccggattccctttgccttgacgcgcatcctttccatataatccgcagaaaccctgtcctccagccggcgtgccagggtcctgcccctggaaatctgcttcagggaggcaatggtcatgttccacgctatgtcctgcttcaggaaaaggccgtccaccttccgctccgccggcacaaacgcaatccctgcatccattgctttcctgactccgcctgactccaggctgttcccatgtatcttcactgtgccgccgtcatagaccgcagccccgaacacagctcttatgacttcgttcttaccgcatccttccaggccggcaagccctaaaatttcccccttgtgtagttcaaaggaaatgtcctcaaaggtactctttttagtgagtcccttcacctccagcaaggtctcccctatgggaacctttgtcttagggtactggtttttcagttcctttcccaccatggctgatatgatgcggtccaccgtataatccttcacatacccttccgagactttctgaccgtctctcagcacgctgactctgtcacatatttccatcagctcatccaggtgatgggaaataaatatgatggagtgccctccttccttaagccgcctgataaccttaaacagctgttccctgtcgttggcctccagggccgcagtgggttcatccatgataatgatctgcgcatcagcgtacacggttctggctatctccaccatctgcttctgggccaggggcagatagcgcagaggtctgtccaagtccaagtccacattcagactgtccctcagaaccctgcccgctatctcctccatctgcttttgcttcaggcgcgataccagagtcctctgcggcgtcagctcccggttgaggaatatgttctgcactgcgttcaggtccggcatcacgcttaattcctgatatatagtactaattcccaatttctgggcatgggatgcatttaggatatccaccttttttccgctcagaacaatggaacccttatccattctgtggattccgcagagtatctttatcagagtagattttcctgccccgttttcaccgataagccctaacacctcacccctgtgaagggtcaaatccacaccctccagaaccctcacacttccgaaagctttatagataccttccatttttaaaacaacatcttcttctgaaaacatccatccacctcactcttactattcataccactccaaaggcgctttccggtatgtttcgtactggtctatatcatggctgaagagaacctgggcatgatatctgttttccagcttccggatgcggtcaatggtccgctcaaatccccttgtatcataggccagccccggatactgcataggaggaccataattcattgcagtattgacagcgtctgatgccactatataattgccgcttcccggcagagtcaccagtaatcccatcattccgtatgcatggcctggtccgaaattcagtacacggatgcccggatacagttccgcttcctcctcatccatggtttcccagttaaggtctgctgccagccaggcttcaatatccttttttatgtaaccgcctgaggtccttcccaatccgtacatgcgcatggtctgggtaaattcctggtcatttaccagaatccgtgactttttaaaaaactcgaggccccctgcgtggtcctcatggagatgggataccacaacccatggaatatcatccggcctgtatcccagccccagaagggcatttaccacaaaatggctctcctccagggccaccggagtccgtttcctgtttcccatgtcccatcggtctgtcatagccttgggatggcatcctgtgtcgaacaggaccggtccctcctcattttctatgagcacataataaacaggtgattttacccagcggctcacggtttccctgttgtctgcatctgccagcgcgggcatagccaccatattagccaggtcgcattcaatcataccgcccggtataataaacattcttttattccccatacagattcctcctgatataagacaggcacagcattcatttccgctgtgcccatgagtccgtcattattcaaatatcacccggtccagctcacctatgttgttcttgtcatataccttggaaggccggttgattaccttttccacactcttgccctcgatgcagaaatcattcacggcgtcgatgatatcaatgcctgtgccgtattcgcccacatcaatagtagcagtcatctcattgttctcaatcgccgccacaccgtccttggtgcatccgtatccaatggtatcaatctgatctaacaaacctctttctttgatagacaccagaccgccaagcaccatctcatcgtaatcgccgaaaatcagattaatgtccggattagaggtaagtatactctcggtgacgctctgtcctttctcccttgtccagtcagctgtctgggaagctacgatctgtatattatccttaccctgtatacccgccttaaagccgtcgattctcatggtatttacaattcctgcatagccttccagtattgccagcttcacttctttgtccccgtagtgctctgccacatatttgccgatttccaggcctgcattgtactggtcataaccaatgctggaaacatagtaaatattgtccttgtccagctctgtcatattgaacaggaataccggaatatctgcttctgccgctgccctcagatatggaagcatggaattgtcactttcggttgccagcgcaatggcatccacgccctgctgtatcatgctctccatgatattgccctgttccgtaatagtgcttgtattgctggccggagcctgtaccagcagttctatatccagccccttgtcctcaatctgtttcttggccccattaatggtcatggtgtaggccgtgttcatggttacgggaatcagacccaccttaagcgtcctgtctttgatggagcgcggctggacagcataccctcctgtttccggctcagctttttcactctctgccgtcttagcctcctctgttgtctccgccttctccgtctccgctttggcctcctgtgtctgagcggccgtagttgtctctgccgccttctggttggaagtggcgcaccccatcagagaaattgttgttgcagctgcaagtagtaatgctaatcttcgtttcatcccttctcctccttgttatgagcacttagcacctgtctttcaggcgcttaggtgcgatacatgtcgctggcacttagtaaagttcgttcgagcttagtgcagcggcttgttatgagcacttagcacctgtctttcaggtgcttacgtgcgatacatgtcgctggcacttagcgaggtcttttcgagcttagtgcagcggctcaatcacagattatacattttatacaatcagtgattattttctacacatcaatcatacattatgcacagttgtgtttcaatgaggtgatttttatattttgtggggtgtttttagatgtttgtgtaatacgaagatatttaccttattttaccataaactaccgtccgactcgtctgttctgccggattccctttccctgccgccccccagggattctttaaacaaaaaatccccggcaaaggaatcatccatcctctgccggggcattctcacactcagcaacatctcatttattcaacatcagtcatacatcatccggctatcccgttgcgccggccatatcccatcagccaacctcggccacccggaatcccctggactccagcatgtccctgcactccccgtccaggtgcatacagtatactttgtgcctcagctgctccggcaccgtctcctccagtacacccacgtagcagtggctggggcttggcggattgtggagggacgtatcgtggtaaacggcgtccagcttcccgtccttaagcatgccggcaatccgctccggcatccgtgcggaatcaccgctgtaataaatcctcatcccctctgcctccagaatgtacccgaagcagtccatattgtccgcatgctccaccggcaccggttcagccctaagacagcccgcgtcctccggaagttcctggtaataattgtaaaattcatccttgatgcccataagccgcagaagctccaccacggtggccctggggtggataacgcagatttttcttcccaggatacagtaattgtaagaaatcagggacccaagacttcccacatggtctgcgtgaagatgggtcagcagcacatatatctgcctgtattccctgagattgctgcgcttcatcagaagctcatataccgtctcgccgcagtccaccaggaacaggcatccgtccatctcaaaccaggcagatgtatttcccattgcaggattaaaggcgctgccgcatccgaaaaaatgcagtttcataacacttctcctctcataactggtttcatatccctaatcactctttgattccggcgctgacaaagctgttcataaactgcttctgcaggaagaagaacgcgatgagcagcggcaggataatgataaaggtggccgcgcagacattggcccactgcatgttggcctctttggactttgcaaagatagccaggcctacggtcagtgtgcggttggacggcgagttggtcacaatcagaggccacaggtagttattccagtggtagctgacggaaataactgcaaaggacatataggcaggctttgcgcagggcatgtacaccctccagatggtctgccaggtgttggcgccgtcaattctggccgcctcagccagagcctttggaatggatttaaaatgctgcctcagcaggaaaatagccagggcgctcccaaagaacggcagcatgatgcccaccttcgtatcggtcagtcccaggtcagccagtgtcataaagttaggtgtgatgagaacgtcatttggaatgatgatctgcatgaaaataacggcaaacaccagggtctgtcccttaaaatccatgacagccagcgcataggcagccagagtggatgtgacaaactgtacgcagaaggtcaccaccaccagtatcagcgtattcaggtaataccgggcaaagggaatggcattccacacataagacagattcccaaaagtaaaacggctgttgggaagaaaggtcatatgaaaggtaggctcgctgaaggcggttcccaccagccagaccagaggagccagccacataagcgccagggccagggcgaaaacagaaattgcagtacttttaacttgtttcataccggctccctcctttaattgtaatgtatcttcttatcctggctgatgaatctgggcagggacaccacaagcagaagtcccagcatgattacggtcagggccgatgatacgccgtagttgaagtttgtaaagccctgctggtaaatatagtacagaagcagggtacttgcattgttgggcgctccctctgtcatgatgaccacatggtccaccagcttaaagcagttggtaaaggcaatcgtggacacaaacaaaaaggtgggcgccagcaggggcatggtgatgcgcctgaacacggtccagttgcctgccccgtcaatcctggcagcctccatcacctcatcggatatactctggatgccggacaggaagaacaccatcaggtatcccgcctccttccagacatacatcaccgccatggccggaagcaccgtactcttgctggacagcacattcatgggctttaagccgatggcgattaacagctggtcaaaaagaccgttctttgccatataaatgaacatccacacgctggcaatggcaatcatgggcataaccaccgggtagaaataggccgtgcggatgaatcccacccgcttgcccttgcggtttaccagaaccgccaggcctaggcccaccgccatactgggaatcaccgtcataagggcgaatacaatggtatttttcattaccttccagaacagcttggaaccggccagcttcacataattctcaaggccgatgaactcggcgccgtccataccaagcttgtactttgaaaggcttagatacaggctcctgaatatagggaacactgtaaatgccagcataaatataagcgccggggccatcagggcccaggctgtcgcattattcctgatttcacgctgcttctttgtcttggttttcatcctctcaccagccttttcatattccgcctgccgtgccgcggcctgtgacacgccccggtctcttaaggcgctgtatatgcccggctgcgcagcaaaggtcttgcctttgccgcgcatggtaccgggccacagcgccttattgtttcctaacaggtattacatttacgtttcatccgttctattggtactctgacaaaacttcctctgcctgctcctgggcagcgtccagcgcttcctgggcagacatatcgccaaccacggctgcctggatattgtcatttaacactctccagatttctgccgcattgtatgtagtaagctcaggctttgcgtacggcagctgctcgtaagcaacagatgcctggggaacctctgcgtaataatccttaatcagatccgtgtcaaagcatgactgtcttgtagccacataacctgtatccaggctccactgtgccgctctgtccgtagaggtggcaaacttgatgaacttccatgcagcctgcaccctgtcctcggaaatattgctggagatatagaagttgccgcctcctgttggcgcgcccactctcttatgggcaggaaggaaggctgttccgaaatcaaagtccgcgttgtcgtggatattggccatgttgccggtggtgtggtaaatcatggccacttcacctgcaaggaactgtgtgggcaggtcggtccactgtacgattccctctgccatgcatttatactcattctggagatccagccagaactgaagcgcctccacattctccggtgtattgaaatatacgctcttgccgtcttcgctcatcaggttctgtccgtcggtgctgttctgtaagcagaagcccgtaaatgcccactgtgcggaaccggaattcagcgcgattcccacgccatagcggccgtcatttgtcagcttctggccgtattcagccagttcctcccaggtggtaggaggcgcttccggatccaggcccacttccttgaaggcatccttgttataatacagcaccatggtgcttctctggaatggtatggagtaaatttttccgtccacataggaatcttccatgaagcccggaaggaaatcatcaatataagcttttccctcatccccgtcagcctcaatcagttcgtcaagaggcatggccatgcctgtggatgccatggtgaaacgctgggttgcaagacttacaaacacatccggaggcgttccgccctgcatggctgtctgaatctttgtcacggtatcgtcataattgcctgtatagacaggctccacgaaaatatcagggttctctgcattaaaatccgcacatattttttcaatcagctgcgctgcggaaccgcctacattaaccgggtaataaaatgtaaggtgaagtgcgccgtcgtcagccttagctgcgtcatccttggactcgccggcgcttccagctgtttccttagactgctctgcggccgccgggtctgtgtccgtacttcctccctttccggaacatccggtgacggcaaggcctgctgccatagtcatggccaggacagctgctgcaatcttttttgtttttttcacaatacatacctcctcttaaactattgggaatttgtcatctgttctgtaatttcatcatagcattgtatttgaaacgtgtcaatattattttaaggcattttgcacatttatcctatattttaaccgggttttacatgaattttttctactttttgcatattttttacattttaacgtatttttatcaagctgtctcatctacagattcccgtttttattgaatcgtaaccgcaacagttttacaaaatgcccgccatatggtagaattgaaccaaatatataacctggaatgcatcatttaaggtgcaccatttgaaaggagaaccggcagatgactactatcaaagacattgctaaagcggccggagtggcccagggcaccgtttccaacgttctcaacggcaagggaaatgtgagcagtgaaaaaatacggcaggtcatggacgccgcctctgcccttggctacgtgcccaatgagcgggccaagctgctgaggaagggcaggtccaatacccttgcggtcattctccccaacatccgttccaaacaatatatagacttctatctgagctttaaggcatatgcggaaaatcacggctacagcgtgtcccagtatctgaccagcgatgacaaccgggaggcggaatatgcagccatccaggatgtccgttcttccatggcccagggcatggcagcagtctcctgctgttcctttgccgacgccaatccctatctggacgagcagggtatgctggcggaccatgtggtatttgcggaacgccgccctccctttgcagccccctatgcaggctttgactatcaccgggcaggaagcgagctggctttaagggcgctggagcgcggcttctccagcctgtgccttctcaccggaagtctccagctgcccaatgaatccgactttttcaacggatttatgagcatcgcaggttcatcgggctgccggataaaccacatccagacagacccctaccgcaagctgcagaatatcatgcagatgttcggcgctgccgccccccaggccatcttcatttccaattacggctttgcggagagcgtcaaggatatatggaacaccttctattccggggacagcccagaaatttatacggtatcccccatgttcaccatgccagaaaatgatttccagaaatatgaacttaactaccggcagctgggaaaggttgcggcggagtgcctgattcaggatatatcaaaagaaaaaaagggggaaaagagcggtccggaagaatcagaggaaccaaaccagcgcaccggacaggacagcggacagggcagcggacatccctgcctgctgctggagaattccggcttcagggactggtttgcggatatcctcatcccatcctccaaaaagcccttaaatgtgctgaccctggacagccccagcgcctacaccatgcgcaacctgtcccgcatctacacgaaaaaaaccggtgtccctgtgaacatcaccatctattcctacgaggaaatatatgaggccttcaaccatatgcatcatgattctgtctttgatgtgctgcgcctggacgtgacatggctgtcctggttcgcggacaagattctgcagcccctggaccagattgaccccggcatctccagctgtctggacaccttcctggacgggaccatcaaccagtattccatagtgaggggcagggtatatgccctgccctccacccccagcgtacagctgctgtactaccgcaaggacctgtttgaaagccccatctaccgcaggatgtatcacgaaacataccgccaggagctccggccgcctcaggattttaaagagttcaaccagattgccagattcttcaccaaggcatgcaccccatcctctcccgtggaatacggggccaccatgacacttggatccaccggcgtggccggctccgaatacctggcccgactgttcagccaccaggagaatctttataacgaggactgccaggtcaccctgaattccccggcggccattggttccctcagggagctcatcgccctgaaggaatactctgaccccaagtactgttcctggtggaccaacacagccactacctttgcagggggcaatgtggccatggccatcctctacagcaactatgcctcagaccttctgagccattcctcccgggtagcgggaaatatcggatatgccctgacgcccggccgcaatccagttatcggaggcggttccctgggagtggccaagtataccaaacggccggaggacgccctttccttcatcaaatggatgtgcagcgaacccgtggcctccgcggccacgctgctgggcagcgtatccccctgccgtaagtcctatgacaattacgagatactcaacaccttcccctggctgaacctggccaaggacggattcggcctggcccatgggcgccgtacccccgaattctccacccagccctttgacgagcgcagcttcctcagcatcataggcatggcagtgaaaaatgcctacagccaggtcatgacgccggaggatgccctgaactatgcacaaaagcgctatgacgagcaattcctccataccggtccataataaaagcgggcattaagacaaaagttccaggcaggtcccctgattacaggaggcagcctggaacttctatgttaaaacgcgttttagccggtttcgtccgttccccctctcagcacagctttgccatgacagacgcggaagttttttcattatttacacagcacttgtcataatatgtcctgtaatattccgtgtacagcatgtcaatcaggaaaagctggctgatttccgctgaggaagagcctgcctgcagcgggctttcattggccccgcacaagagggtcaggtctgcgtaggccgtaagaggcgacttgatgaaccgggtcacacagacaatggccgcgcctgcctgcctggccagctgggccacatggatggtgtccttggttgccccggaataggaaaagataacagccacttcgcccctggacatggtggaggccatcatggcctgcatatgggaatcaggagaacagtagacctttggctcaatcttaagaaatttatcagctgccttcatggctgttgtcatgctggtacccactccgtaaaagcagatacgtccggccttatggaagcactcaaccacccgctggaacacgtcctcctttaacagggaatgagtctccttaagggcctttacattggaattgagaaccttctccgccacctgggaaaaagagtcctccaggctgatatcgctctccatctgtccgaatccctgctttccctcatgaaggctcagggataaaagcatcttgaattcctggtagcctttacagttcatggtcttgcagaagcggaacacgctggtatcccccaccccgcaggcctcggccagctcagtgatggacatgaacagaaccttcttggggctgctcaggatataatcagccacctttttctccgcctttgtaaactggttatacccgcctcttattttcaacaaaaaatcctctgccattttccttcctccttctgctgcccgccctgtgaaaatttaatttactcttattataaaaaaaaatatttcttttagcaagaaatgtagtagaattaaattaaataattgccattttcaaagaggggggctgtattatgaggcatatctcaaaaaaggagcttttgtccatccccaacctgatggggtatttccgtttaattatgattcctgtgtttgtgtggctgtacctgaaggcatccacagatgcagactattacagggctgccattgtcatgggcatatcctccatcacagacatgttcgacggaatgatcgccagaaaattcaatatgattacggagttcggcaaattcctggaccctctagcagataagctgacccacggcgctatcctgctctgtctgtggagccgttatcccctgattctgctccttctggtcctgtttgtgctgaaagaaggcttcatgctaatcatgggcgccatcaagctccgggaaggcaagaagttaaacggcgccaagtggttcggcaaatgctgtaccgcgcttctgttcgtggtgcttttcctactgctgctcttcccccacatgtcacttgtcacggtcaatgtactgattttgctgtgcgcagcagccatgttcatcaccctgcttctctacataccggtatttcgcagcatgtaagcggtataacatagggctggggcccgcatgcagcggggcctgtctgcactttactgccgcgcttccttatatactctcttaagggtaaagcccctgcctctcacctcattaatctggttgataatcataaaggcctccgggtcttcatccatgaccaggttgttcagcctgggcagatcccgcctggaaatcaccgccagaatcatttcctgctccctgtggagataaccggtctccatatgcagcagtgaggtaccgcagtcaatgcgctccgctatgaggcggttgatctcctcataccttctgctgacaatcttcacctgtattctggcatttcccgacataaggacctggttaagcaccatggtatacacgataatcagtatgataccgtagagaatggcatgggaatcagcctcaatcagctgaagccccagaaccacacagtccatgatatacagagtcatggacacattcacatccagctttttcttaagcaccagggcaggaatgtccatgccccctgtggaggctcctgcccgcatcactataccgatccccccgcctatgagcagccccgcatagagcactgccaccagcttctcttccagcacaaagccaccaaatccgcttccctccatcacccccagcaaaaccgggtagataatggtgctgagtacggttgtcagggcaaactgtttacccagcacccatgcccccagcagaaacatggccacgttaaacacgctgacaaaaaggctgatggggatgccaaggctatggttcacaaacagggccagtcccgtggttcctcctgtaatgagaccgttcggcacaatgaacagcaccactgctgccgcgtacatcatatttcccaccaaaatttctcccagactgaatacaatcttagccgtcgtttttttcttttccatgattttagtcctttctcactgcaccggaatgaattcccaaattaaaagacggcagatttctctgccgtcctgatgtctcaaatcttctatatataaacacccggttccgccggggccttcttctgtatgctttcagtaccatcatgttctgcgcgctctctgtttcgtataatgaatcctgcattttatggtagcatgtttccccaaacctgtcaagagccccttccatccgtccatcccatgtgctaaactgtaagtataagaaaccatgtaagaagcgctcaatagaaggaggtatacctatgaaaaaactgattcgctgcgccaaccagtacatctgggagtccgactggaagaccatcggactgttaaaattctgtctcctgtccctgggcatctgcgtcggcatggcagtgccggaggaaaagaaaaagacggtcctcagagccgcctttctgtcctttgtcataagctatatccctcttatggccaaattcatccagattatatggtctgatgagggcgactggtaggctcccccgttccatgcagcagagggtcccggttcagcaccttcagataaatgccgcagagcaggatttgcagcaatgtggaggccggcgtggccagaccgattttaaataaggacaccggaaccagacggctcatgagataggacaccggtatgcggacaccgaaggctcccgcgattccctgaaacatgacaaaggcggtccttccgcatccgttaaagaaacctgtcatgcagaacatgaaggataccagcagacagtcaatggcataggcccgcagataatctgccgccgccagcaccacctcccggtccctggagaacacaccagccagcagatctccgtggaaaaatgaaaaatacgccaggaacacgcccactcccagagaagtgagtataccatatgcaagggcccgtttggcccgttccggtctccgggcgccgatattctgggccacaaaggccgacatggcctgcccgtaggcagatggcaccagcagcacaaaaccgcagagtttttcagccacgcctacaccggccgaaggaatgactcccagggtattgacaatggctgatataaccaggaaggatatggacaccagcacatcctgaaaagcaatggggaaacccagcttcaccacccggccggccagctgcctgtcataacgaacgctctccttgcgaaaagcaaaggggagcttctgttttctgataatcaggattgacagcaccacgctgaccgcctgggcaaacaccgtggctatggctgctcctgcagaagccatgtggaataccccaaccaacaacaggtcccctgcgatattcaccaggcaggcaatggacacggatatgaggggaagcctggaatttcccagtcccctgaatatgcttcccagcagattgtaggccacgataaacagcgagcccgcggaacagattttcacatacaccgcggtactgtcaaatgcctctttcggcgcccgcatccatgcggtgcagggaactgccagaaactgcatgaccgcagtcaccgccagaccgatgacagcaaatatccatatgctggcgcccataacccggccagcctcctcaggctgcccctccccaatcttcctgcccaaaagaatggtggttcccatagccagtcctacgatggccgtggttatggtctgcatgatccagctgcccgtagacaccgcggacacctccgccgcatggctgaactgccccacaatcatcatgtcaacagccccatacatggtctgcaaaaacaaagcagccagcacaggcagcgcaaaacccataagagatgtgagaatgtttccctctgtcaaactgtgcggtctgctcataataccccctgtctatccccaattttactctgtcaaatcagctttatccccaaaaacatactgttttcgcacaaaagccggaatcagcataccacatagccccctggctgtcaacattctgtataaataccacatttatacttgataatttttatctactttgctataatagtatataagaattgttacaattttaacaataaggtgataacactatgatgataacacgcgaatccgattatgcaatccgcattatccgcgccctgaaggacggggaactgcttcccctggaacagatatgccagcgggaactggtgccgaaacagtttgcatacaagatactgaaaaagctggagcgttccggcctggtatccatacgcaggggcgccggaggcggatgtattctgaaccgaagcctggcggatctgaccctcctggatatcattaaggcggcggacgaggaattttttcttaatccctgcctagacagtcaataccagtgcggctatgccgccagttttgacggctgcaaagttcactgtgaactggcaagagtccagcgtgtgctggaggaggaattgaaacgcacctctttagacaggctctttaacaaatccggctgatacatctatttttattcgccccaaaagtggataatttttatccactttatgatattcaaacctacgcaaaccatatatttcaacaggaggtatccatcatgaatcattgttacagctgcacaacctgtaaaagcgcagacaaaccactggaatgttacatagcaggtcttcccatggaaacatcccaccaccgtgtggaaggacagtccgtcaaatgcggcttcggtctccagggcgtatgctgccgcctctgttccaacggcccctgccgtatcacgcctgaggcccctcacggaatctgcggtgcttccgccgacgtaatcgtggccaggaattttctccgcgcagtggcagcaggatcaggctgctatatccacgtagtggagaccactgcccttaatttaaaggagaccgccctttccggcggagccttaaaagggatgaatgccctggaacatctctgccagctattcgcaatcccccagggcgacccacacacccgcgccgcagccgtggcccaggcagtcctggacgatttataccttcccgactacactcccatgaagctccagcagaagctgtcatacgctccccgtctggccaagtggaacgaattaggaatcctgcccggaggcgccaaatccgaggtctgcgccggcgtggtgaaatgttccaccaacttgaactcagaccccacagacatgctgcttcactgtctcaagctgggcatttccaccggcgtatacggtctgatgctgaccaacctgctgaatgacgtcatgctgggcgagcccgaaatcacccctgccccggttggccttggggtgattgacccggactacatcaatatcatgattaccggacatcagcactccatcttcgtccatctccaggaacagcttaagaagccggaggtccaggagctggcaaaggcagcaggggccaggggattccggctggtgggatgcacctgtgtgggccaggacctgcagcttcggggcgttcattaccaggacatcttcagcggccacgcaggcaacaactacaccagcgaggctgtcctggccaccggtgccatcgacgccgtgctcagtgaattcaactgtacccttcccggcattgaacccatctgcgaccgtctgaacatccggcagatctgcctggatgacgtggcaaagaagcagaatgcagcgctgaaaccctttgtgtttgaggacagggagcgcatcagccgggaaatcctggacgagatactggaatcctacaaaaaccgcagggcccgggtgcccttaaacctccttccggaacacggcaataccaacaccatcacaggtgtcagcgaggtatccctgaaaaagttcctgggcggcagctggaagcctctcatcgacctcattgcttccggggatatcaagggaatcgccggtgtggtgggatgctccaacctgacggcaggcggccatgacatcctgaccgtggagctgaccaaagaactcattgccagggatatcctggtcctgaccgcgggatgttcctcaggcggcctggaaaactgcggcctcatgaccccggaggcagccagcctggcaggtccaaagcttcgggcagtctgtgagtccctgggcatccctcccgtgcttaatttcggcccctgtctggccatcgggagactggagatggtggccacggaactggcccaggcccttaacgtggacattccccagcttcccctggtgctctcggccgcccagtggctggaggaacaggcgctggcagacggcgccttcggactggccctgggtcttccccttcacctgggacttcccccctttatcacaggcagcagcctggtgacaaagatcctcacagaggacatgaaggcccttaccggcggacaggtcattgtaaacagccatgcaggtgaatccgcggacattctggaacaaatcatcatggacaaacgacaggcactgaatatataggagggcggctatgaaacggatatggattgacgccggcaggtgcgatggctgcctgaactgcacacttgcctgcatgaatgcccacagggcagataaaggcagcatatatgatttggatctgacagatcctgccaacgaaagccgcaacttcatccgccggcagccggacggttcctaccgccccattttctgccgccactgtgatgaaccggaatgtgtgaattcctgcatgagcggcgccctttcaaagaactgggaaacaggaatcgtggaatacgatgaaaaacagtgcgccggatgtttcatgtgcgtaatgaactgcccctttggcgtccttaaacccgacaatacagcccgctgccgcatcatcaaatgtgatttctgcaaggacagcggcagcgaacccagctgtgtaaaggcatgtcccaaaaaggcaatctggattgaggaggtggagtcatgagatatgttatcgcaggagccggcccggccggcatcagcgcagccagaaccctgcgccaactggacagggacggtgaaatcgtcctggtatcgaaggatgaccaggtccactcccgctgtatgcttcacaaatacctgggcggtgagcgggacgcagaaggaatcagctttattccgcccggcttctttaagcagaacaacataacctggtatccaggaaaggcaatggtccggctggactgtgctgagaggcgcatcctcttagatgacggcaccttcctcccctatgaccggcttctcctggctaccggcgcctattaccttctgccgcccgtacccggacttaaggaggcagaaaatgtgtacggcttccgcgatctgtccgatgccctggccattgacaaggccgtaaaaccaggggccagggcagtgataatcggctccggcctggtgggtatggacgcagcctatgcccttatggagcggggaatctccccggtaatcgtagagatggccgaccggatccttcccctccagctggatgccaaagctgcgtctgagtaccagagactctttgaacaccacggatgcagcttccggctggcagccagggcaagccggacccgtctggattcccggggcaatgtaagcgccctggttctggaggacggcgaagaactggcctgcgacttcatcattgcggcggcaggcgtacgcccggaaatccgttttctggagcattgcagcgtggagacgggcagggccgtcacagtggaccagtatctctctacctctgttcccggtgtctacggggccggggatgtgtgcggcctgtccggcatatggcccaacgccatgaagcagggcgccgtggctgccaaaaacatgtacggcatccccactccctacgaggacacatatgccatgaagaacaccatgaacttcttcggcctgccggccctttgcattggcgacatcaaccgcctggacaactccactctggtcataacagaggaggacagcaaaaactacagaaaggccctggtggaggacggcgtactgaaaagcatactgatggtgggaaatatatcaggcagcggtatttaccagtatctgataaaaaaccagataaaactaccgtccgccgaccggagcatcttcaggctgtcatttgccgacttctatggatttgacacgtcaaaggggtcctatacatgggacacggacctgtgctgcggttaagtttcattccagatatcacaaaacccccggaagatacatcttccgggggaattttactgtttgggcacaatatcaattcagatatattattttatgattttagcgtataagcttgccgaaattattcaacgatgcttacaactctaccagaaccaacggttcttccgccttcacggatagcgaaacgaagaccctgctccatagctactggatgaatcagctctacggtcatctctacgttatcgccaggcatacacatctcaacaccctctggcagatcgcaaacgccagtaacgtcagttgttctgaagtagaactgtggacgatagttgttgaagaaaggagtatgacggccgccctcgtcctttgtcagaacgtaaacctgagcggtaaacttgttgtggcacttaacagaacctggcttgcacagacactgtcctctttcgatttcagttctctgaacgccacgcagcagagcgccgatgttgtcgccagcctgagcctcgtcaagcagcttacggaacatctcgataccagtaacaacgctcttacgaacatcctcatggataccgatgatttcaacttcgtcattcaggtgcagagtaccacgctctactctaccggtagcaacagtaccacgtccggtaatggtaaatacgtcctctacaggcatcaggaatggcttgtctgtttcacgaactgggtctggtacccactcgtcaacagccttcatgagctcaagaatcttgtcgccccactcgctcttaggatcttccagagccttcagagcagaaccctgaactacaggagtgtcatcgcctgggaactcatattcattcagcaggtctctgatttccatttctactaattcaagcagctctggatcatcaaccatgtcgcacttattcataaatacaacgatataaggaacgcctacctgacgggacagcaggatgtgctctcttgtctgagccataacaccatcagtagcagctacaaccaggatagcgccgtccatctgagcagcaccagtgatcatgttctttacgtagtcagcatgtcctgggcagtcaacgtgtgcgtagtgtctgttctctgtctcatactcaacgtgtgcagtagagatagtgattccacgctctctctcttctggagccttatcgatattctcgaaagcaacagcctcgccggtacctaatctctcatgaagagtctttgtgattgctgcggttaaagttgttttaccatggtcaacgtgtccgatggtaccaatgttacaatgaggtttgtttctttcaaacttagctttagccattttataacgtcctccttaatttgcgccctgtataatgggctattatagttaatgtcaggctatcaaccattatattctattttcctttagtttacaagccttttatcaagaatctatcttatttcttatggtcggaaagtactttttcctgtacattcttcggaactggttcgtacttgtcaaagaacatggaatagtttccgcgtccctgtgttctggaacgaagatccgtagaataaccgaacatttctgacagcggaacgtatgcgcggaccatcttgccgcctccgatgtcttccataccctcgatacgtccacggcgtgagttgatatcaccgataacatcacccatgtagtcttccggcatggttacttccaccttcatgataggctcaagcaggattgggttgcccttgtgcatagcttccttgaatgccatggaaccggcaatgtggaatgccatctcagaggagtcaacctcatggtaagaaccgtcgtatacatcagcgtgaacgcccagtactgggaatccgccaaggataccggtcttgcatgcctcttcaataccctcgcctacagcagggatgtattccttcggaatagcaccgcccacaacggaagaagtgaacttgaaggtctcttctgcgtttgcttccattggtgtaaagtgaaccttacagtgaccgtactgtccacgtccgccggactgcttcgcatacttgctgtcaacatcaacagccttggtaaatgtctccttgtaagcaacctgaggcgcgcctacgtttgcctcaacgttgaactcacggagcagacggtcaacaatgatgtccagatggagctcgcccataccggagataatggtctggccagtctcttcatcggtacgcacacggaaggtcggatcctcctcagccagcttaaccagcgcatcgcccatcttatcctggcttgctttggtctttggctcgatagcgatatcaataaccggctctgggaattccatggactccaggataaccggattcttctcgtcacagatggtatcgccggtggaagtcaccttaaatccaactgcagctgcgatatcgccggagtaaaccctatccagttcgtttctcttgttggcatgcatctgaagaatacgtccaacacgctccttcttgcccttggttgcgttcagtacgtaagaaccggagttcaggcttcctgaatacacgcggaagaatgccagcttacccacaaatgggtcggtcatgattttgaatgcaagagcagcaaacggctcatcatcagaggaatgacgctcaacctcgttgccgtccaggtcagtacccttaatggaagggatgtctaacggtgaaggcataaattcaataactgcatccagtaacttctgaacgcctttatttctgtaagcagtaccgcagcataccggaatagcggcacactcgcaggtagctttccttaaggctttcttaaggtcatcattgctgggctcctcgccctccagatatgtcatcattaaatcgtcatccagctcgcagattttctctactaactcggaacggtataactcggcatcatcctgcatatcctcagggatatcaatgatggatatatcgtcgcccttatcatcattatagatgtaggctttcatttcaaacaggtcaatgattcctttgaaatcatcttccttgccgattggcagctgaatgcagattgcattcttgccaagtctggtcttaatctggtctactgcgccgtagaaattcgcacccagaatgtccatcttgttgatgaaggccatacgaggtacgttgtaggtgtctgcctgacgccaaacgttctcagactgtggctctacaccgccctttgcacagaacacgcctacagcgccgtccagtacacgcagggaacgctcaacctcaacagtgaagtcaacgtgtcctggagtatcaatgatgttgatacgatgctctaatgcacctggcttcggcttgcagttttcctgcagggtccagtgacaagtggttgcagcggaagtaatggtgatacctctctcctgctcctgagccatccagtccatggtagcagtaccttcatgggtatcgccaattttatagtttacaccagtgtaatacagaatacgctcagtcgttgtggttttaccagcatcgatatgggccatgattccgatattcctggttctctccaatggatattctcttccagccaagggattttcctccttaaataatcaaacaggttaaacacattccaaagattagaagcggaaatgtgaaaatgccttgtttgcctctgccatcttgtgcatgtcttctttcttctttacagatgcacctgtgttgttggcagcatccatgatttcatttgccagtctgtccttctgggtcttctcgcctctcttgcgggagtagagggtaatccagcgaagagccagagtctgtctcctctcaggcctaacctcgataggtacctggtaggtagctccaccgatacgttttgccttaacttccagaacaggcatgatgttgttcattgcttcttcaaaaacttccatagcgtccttgccggttgtctctgcaacacggtcaaaagcgccgtatacaattttctgcgcaacacccttcttaccatctaacataatgttgttaatcagcttggtaacaaccttgttattgtagattgggtctgccagaacgtctcttttctgagtatgtcctttacgtggcacgttacttccctccttaatagaactgtaaagacctgcgctgcagatcccttacagcgtttcattagatcataggtactcgtgctttgagtgcttagcgaggtctctcacgagcttagcaatcaagcacacctgcgaagcgagcgcgtctttaaacgcggcactgagcatggcgcctcctgctgctgttcttcctctgcaccttccacacgttcatgcacggtactacaatatataatcctgcaacctacaggtcaatatcatcattccggcacaattcctacaaatcaaatctgcggtctaactaaattatttcttctcttttggcctcttagcgccgtatttggaacgggcctgccttctgtttgcaacacctgctgtatccagtgtacctcttacgatatgatatctggtacctggaagatcctttactcttcctccacggatcagtacaacactatgctcctgaaggttgtgaccttctcctggaatgtagcttgtaacttcgatgccattggaaagacgtactctggcaatctttctgagtgctgagttaggcttcttaggggtagctgtcttaacagctgtacacacaccacgcttctgtggagcagaaacctctgtagccttcttctgtaaggagttgtaacccctctgcagagcaggtgcagtagacttcttaacgctggtctgtcttccctttctcactaactggttaaatgttggcattcttttcacctcctgtgatattgtctgcggttgctgtatatcagctttttgcgcacgaaaacattacgtgtttcagcacgccatatcattatatacacgcaaaaaaattctgtcaaggaatttctttattttttcgcaatttccggcaccaacggccttaaaacacgcccaaaagagcagtatatgccagcgtgactgcgaaaaacaccagaatcataggaatgtttctccttaccagggcgccgatatccactttaaagcattctgcggcaatgaacaggcatacatgggtaggggatacctgcatggctgcataggcagaactcatgagcagtaccagcaggggaacgcctgcgtccggcatggccgccatggccatgggcatacacagcggtatgatggcattggaaccgctgataatggtgccgaagaaaaatatcagggcaaataccatgggaaggggaatgggcagacctccgaaaaatacaggcagttcatggatgacccccgtataggtaataatatccttaaacatcataattaatatagtattaaaaatgatgattggctcaaacgcagtcctgaacataggctttatctcccatggcttcagatggtccacaaaaatattgaggacggccgccatcggtgtcgccacataaaccggtatgtcaaaggcaataatcagcactacaatcaatatgatggaccacagactcttaaacagcatgaccgccgcctttttcctgccttcctccgtcttctgtcccgtggacctgggaacctttctgagatagaacatgtgcccgataaagaacagagcagccaccagcggcagcatggcaagtacgaattcccctgctcccacgccagacacagccagcgctatcaatatggaggaataggtgggcagaaagctctccggtatatggcggtaaaaactggtgacacaggtcatgtcctcattgctcaggtaatcctggcatgaggacctgacaatctccgcgcatatggtcatggcacccgccgagggaagcaggccgatgaccgcaggtgccgcggacgcatttaccctgcggttgttaaacagccagtttaaggactgttctgcctgctttaagcggttcctgcgttccagcatacgctggaggaaggtgataaagtaaaagctcaggaccactgtaatcgtatccttgctgaccatggaccttcccatgatggaaagggcgtcaggtacacggataccgtacagaaccagggccgccgccagtccgcctgaaatggcccagaacaaaggacgcttcatccacaggatggcaatgattacaacgaacacgaaacagagcttcattattaatatattcatttcttattctcccatacacattattacagctgccatgatataatcctaccatggcagctgccttgactgctacttatttttcagattcatttttcttctggccgccccctatgtagctttcgttagtttgtcaataaaagattgtcgctttcacgcacaaatgttaatatctttctggaggtatgaacatgggattcaacgagaatttaaagctgttactattagaaaaaaatatgaagctggcagatttgtgccgcatggcagacatacagacctctctcatgtccgaatatataaacagcaggaaaagtcctaccaccggcaatgccatattgccgatgtccttaacatttccctggataatctggcaggcagaaagtggaatacctgccgcgatcataaaaagcctggtgcgtataccggtgaatatacgggtgaatacacagatgaattaagggagacattgcataaattgacagaaaaggaatgtatctttgtcatggatgttatcaaggcgctgaagcagcatctgcaatgaaaaaaaggccggggcgcgaagctctggccttatcaatatatatatttatatcatttttctctggtatcatttttctctggtaccatttttctccggtaccgttcctctatgattacatacctgaaccggctcggactaacttgatcttttcacgtgccttttatcttaccgtcccatgtacgtatcatgtacgtatcatatacgccccatgtccatccgcaaagtcaagaccaccggcttagccggtggcttgttctgcccctataaggggctgttacctgcttgcgcccggaaggcgcactgaaaagtctgccaactgcaccacattctcagctgcccttaaaagggcatattcagcgcttccttactccggctttgccccaatgggggcttgctggtttgctttggctccctactgactcttatgagtcttacttcttgtttttcttcaccggctcacccgtaaacgggtcaatgtactctactaacgacatctgatcatattccaaatcttcctttatctgattttgtatatatgcctttatggccgctgtattcttccctactgtgtccacgtaatatccacggcaccagaaatgacgatttccgtacttatattttaggttcgcatgcttctcgaatatcataagtgaactttttcctttgagataccccactacctctgacacagcatatttgggcggaatacttaccagcatatggatatgatccggcatgcattgtgcctcgattatctcaatcccttttcttcggcataaggtccctagtatttggcctacatctgccttgatatccttatatattacctgcctccgatattttggtgcaaaaaccagatgatacttgcaatcccattttgtatgagctaaactgttattgtccatttttggacctcctgtgcttttttatttgtggtttgcagacctacatctattttagcacaggagttgcttttatctgaagatattccctccacctgcagagcaggtggtttatttttactgtgacacaaaaactccgggaagaaacatacgctgttccttcccggagcatgattactatatggtctctatcgtttctatggtctcggtctattcttcctctactgcatcgtcctcttcatccacatcagccatatcgtccattcccagaacttcctctgcaacattgtcctcggtgagtccgctgctgctctcatcctcggaagaaagcaccagttcatcgtcatcagacagcaggatttcatctgaaatcaaatcgtctgtgtccagcttcaccttgcggtaacgcttcatgccggtacctgccggaatcggcttaccgatgataacgttctccttcaggccaatcagatggtcaaccttgccgttgatggctgcctcggtcaggaccttggtggtctcctggaaggatgcggctgacaagaaggaatctgttgccagggatgccttggtgatacccagcatgacctgtctgccttctgcgggcttcttgccgtcggcaatcagagcctcgttcatctcgttgtaatccagaacatccatggatacgcccggcagcacatcgctgtcgccgctctcctcgatcttgattttcttaagcatctggtgaacaatcatctcaatatgcttatcgttgatttccacaccctggaggcggtatacacgctgtacttcctggagcatgtaatcctgcaccgcacggacacccttgattttcaggatatcgtgggggttgatgctgccttctgtcagctcatcgccggcttccagcacctggccgtccagtaccttgattctggaaccgtaaggaatcagataggtcttggcattgccggtctcattgtcggttaccgtaatctcgcgcttcttcttggtatccttaatctgcaccacgccgccaaactcggtaatgatggcaagaccctttggcttacgggcctcaaaaagctcctccacacggggaagaccctgtgtgatgtcgccgccggccacgccgcccgtatggaacgtacgcatggtaagctgtgtaccaggctcaccgatggactgtgccgcgatgataccgacagcctcgcccacctgtacaggctggcctgttgccatgttggcgccgtaacacttggcgcacacaccgatatgggacttacagctgaggacggtacgaatcttcacagacttgcgtcctgtcttattcagcaccttcataacagctgcggcgcgcttcggtgtacacatatggttagccttaaccacaacctctcctgtatccgggtcagtgatggtctcagcgatatagcgtcctgtgattctctcttccaggtcctcgatgacttcatttccatccataaaggccttgatttccataaatgggatatccctgccctcgcagcagtccacttcacggataatcaaatcctgtgatacgtctaccagacgtctggtcaggtaacctgagtcagccgtacgcagagccgtatcggacagacctttacgcgctccatgagctgagataaagtactccaatacgtccagtccctcacggaagttggatttgataggaagctcaatggtatgaccggtggtatccgccatcagtcctcgcatacctgccagctgcttgatctgcttatcagaaccacgggctccggagtcagccatcatgtagatgttgttgtacttatccaggccggtcagcaggtcatgtgtcagctgatcatcggtggtcttccatgtctcgataacctctttgtagcgctcttcctcagtgataagtccgcggcggtagtttttcgcaatgcggtccacagttgcctgtgcttcctcaatcagcttgggtttgctctcaggcacggtcatatcggaaatagaaacggtcatggccgccctggtggaatatttataaccaatggccttgatatcatccagggtaacggctgtctgggttgcgccgtgtacgttaatgaccttctcaagaatctgctttaactgctttttggcaacgtggaaatccacttccagcttcagctcgttttccggaatgcttctgtccacaaatcccagatcctgaggaatgatttcattgaaaatgaaacgtccgatagtggagtcaatggttcctgtctccaccgtgccgtcggacatggtcttgctgacccttaccttaacccgtgaatgaagagttgcctcctggttctcatatgccaggatcgcctcgttgacgctcttaaataccatgccctcgccctttgctcccggacgctcctgggtcaggtaatagataccaagcaccatatcctgggaaggaacagccacaggaccgccgtcagaaggctttaacaggttgttagggcttaaaagcaggaaacggcactctgcctgggcctctacggacagcggcagatggacagccatctggtcgccgtcgaagtcagcgttgaaggccgtacacaccagaggatgcagcttgatggccttaccctctaccaggataggctcaaaggcctggatacccagtctgtgcagggtaggggcacggttcagcataacaggatgctctttgataacatcctccagcacatcccatacctccggctgcagtctctctaccatcttcttggcattctttatattgtgggcggttccgttggaaaccaactccttcataacaaagggcttaaacagctcaatggccatttccttaggaagaccgcactgatatatcttaagttcaggtccaaccacgataacggaacgtccggaatagtccacacgctttccaagcaggttctgacggaaacgtccctgcttaccctttaacatatcggaaagggacttaagggctctgttgcccgggccggtcacaggcctgccgcggcgtccgttgtcaatcagggcatccactgcctcctgaagcatacgcttttcgttgcggacaatgatgtcaggagcgcccagctccagcagtcttgccagacggttgttcctgttgatgattcttctgtataagtcatttaaatcagaggtggcgaaacgtccgccgtccagctgtaccatgggacggatatccggggggataacaggaatcacatccataatcatccactcaggacggttgcctgaggtaaggaatgcctccactacctccagcctcttgataattctggcgcgcttctgtccggtggaatccgccagcgcccttctgaggtctgcggaatccttttccagattaatggccctcagcagctcctggatggcctcagcgcccattcccacgcggaaaccgccggtgccgccgtacttctccacttcctccctgtactccttctcagacaggacctgcttatactgcaggctggtggaacccggatccagaacaatataggatgcaaagtacagcaccttctccagcgtcctgggggagatgtccagaatcagacccatacggctgggaattcccttaaaataccatatatgggatacgggagcagccagcttgatgtggcccatacgctctctacggacacttgcctttgtcacttctacgccgcagcggtcgcagataacacctttataacgaatctttttatatttaccgcaatgacactcccagtccttactaggcccgaagattctctcacagaacagaccgtccttctcgggcttaagtgtcctgtagttgatggtctccggcttcttcacctcgccatgggaccactccagaatcttatcaggggaggccagaccaatcttaatggcatcaaatgtcattggatgataagtttcattagtttctggcatgagcatttactcccttctattcttcgtcttcaccgtcagcagcttcatccaggaacaaatcatcctcgtcatcagcctcttcggtgtaatcatcggcgcttacttcttcttcctcctccacagctaccagctcgctatccttgaattcctgttcctgatagccaaactgtgcataggattccttctcctcgaagcggcgctcgccctctaacatggcgcgcagctctgtatcgccgtaatcaatattctcattcatctcgacctcggtgccgtcatccctcagtacctgtacatccaggcccagggactgcatctccttaaggagcaccttaaaggactccggtacgcccggctcagggatattctctcccttgatgatggcttcgtaggtcttcacacggcccacaacgtcgtccgacttaacggtcatgatttcctgcagggtataggaagcgccatatgcctccagtgcccaaacctccatctctccgaaacgctgtccgccgaactgggccttaccgcccagaggctgctgtgtaaccagggagtaagggccggttgaacgcgcatggatcttatcgtcaaccagatggtgcagcttcaggtagtgcatgtgtccgatggtaacagcgccgtcaaagtactcgccggtacgtccgtctctcaggcggaccttaccgtcacggctgatgggcacacccttccaaagctccctgtgctccaaatgggcgcccaggtagtcgataacagaaggcttcagcaggtcttcgtatttagctttaaattcatcccaggacaggttcacataatcgttggccacttccagggtatccataatgtcgttctcgtttgcgccgtcgaaaatcggggtggatacgttgaagcccagggccttggctgcaaggcttaagtggatctccagcacctgtccgatgttcatacgggaaggcacgcccagagggttaagcacgatgtcaagagggcgtccgttgggcaggaaaggcatatcctcaacaggaagcacgcgggaaacaacacccttgttgccgtgacgtccggccatcttatcgcccacagaaatcttacgcttctgggcaatgtagatgcggactgtctggtttacgcccggtgacagctcgtctccgttctccctggtaaataccttggcatccacgatgatgccgtatgcgccgtgaggcaccttaagggaggtgtcgcggacttccctggccttctcgccgaagatggcgcgcagcaggcgctcctccgcggtcagctcggtctcgcccttaggagttacctttcctaccaggatatctcccgcacggacctccgcgccgatgcggatgatgccgcgctcatccaggtctttcagggcatcctcgcccacgcccggcacatcgcgggtaatctcttccggtcccagcttggtatcgcgggcttctgcctcatactcctcaatgtggacagaggtatatacatcctcctgaaccaggcgctcggataacaggaccgcatcctcgtaattgtagccttcccatgtcatgaatccgataagggggttctttccaagggcaatctcaccgttggaggtggatgggccgtctgcgattacctcgccggcttccacatggtcattcttatatacgattggcttctggttgtaacagttgctctggttgcttctcttaaatttggtcagatggtacacatcgcggttgccgtcgctgtccctgcggataatgatttcattggaagcagagcgctctaccacgcccgcgttcttagccaccacacatacgccggagtcaacagctgccttggcctcaatacccgtacccacggcaggggcttctgtggtcagaaggggcactgcctgacgctgcatgttggaacccatcagggcgcggttggcatcgtcgttctccaggaatggaatcatggccgtcgcaacggagaataccatcttaggagaaacgtccatcaggtcaatggtctttttctggaactcggatgtctctgtacggaaacgtccggatacgttattgtgtatgaagtggccctcctcatccagggcctcatttgcctgtgccacaacgaagttatcttcctcgtcagcggtcaggtacaccacctcatccgttacccttgggctggacggatccgtggtcttatccaccacgcggtagggagcctcgatgaatccgtactggtttacccttgcataggttgccagggagttgatcagaccgatgttgggaccttcaggcgtctcgatagggcacatacgtccgtagtgggtgtagtgtacatctcgcacctcgaatccggcacggtccctggacagaccgccagggcccagggcggagagacggcgcttatgggtcagctctgccagcgggttattctggtccatgaactgggacagctgggaacttccgaagaactccttcacagccgcagtcacgggcttgatattaattaaggactggggagtaatgccatccatatcctgggtggtcatacgctcccttaccacacgctccatacgtgacagaccgatgcggtactggttctgaaggagttcgcctacggcacggatacggcggttgcccagatggtcgatgtcatctgcgttgcccacctgctcctccagatgcatattatagttaatggaagcaagaatatcttcctttgtaatgtgttttggaatcaggtcgtggatattcctgcgcacagcctccttaagagactcctcatcggtgccagcttcttccaggatagaagccagggccgggtaatatactaactccgtaacgcccacttcctccgggtcaaagggcacataagcggaaagctccaccatcatgttggagagaaccttctgcttcctgtcaggaccgtccacccatacatagggaactgccgcgttctgaatcctcatggcagattccttgtcaagcttggtgcctgcctctgccagaatctcgcctgtggcggtatccaccacatcctctgccagtacctgtccgttcagacggtacttaaaggacagtttcttattaaatttatatctgccgacttttgcaaggtcatatcttctggggtcaaagaacatgctgttaaggagactttctgcactgtcaacagataacggctcgccgggacgaatcttcttatataattccagaaggccatcctggtaattatcggaggtgtcctttccgaagctggctaagagctttggctcctcgccgaagagttccaggatttccgcattggttccgaagcccagggcacgaatcaatacagtcacaggcaccttgcgggtcctgtctacacgtacataaaatacgtcattggagtctgtctcgtactccagccatgcaccacggttggggataacagtacaggtatacagttccttacccactttatcatggccaataccgtagtagataccaggggaacgtaccagctggctgacaataacacgctcagcaccgttaatcacaaaggaaccggtatctgtcatcaggggcagatcgcccatgaaaatctcgtgttcattcatttcatctttatctttattgtacagtcttacctttaccttaagtggtgcagcgtaagttgcgtcccgttctttacactcttcgatggtatactttatatcatccttacacaatgtaaagtcaacgaattccagactcaaatggcctgcaaagtccgctatgggagagatatcatcaaatgcctccttcagtccttcttttaagaaccactggtaggagtctttttgaatctcaatcaagttaggcatttcaagaacttctttctgtcttgaatagctcattcttacgcttttcccggccggtaccggacgtattctgcttttctccattgacgtttcacccctgttttctaatttggttcgcaatatttccatctcaatctgccgccgaaccggacgccagatgcagcaaaatatcactgtcgttctctgtaattgggcgtcataccacgtaaaaccgtacgtgagggcgcaaaaagcccacgccgccacaatagtgcacactccataataacacagacctgtcaaggtgtcaaggatttttgcttgcaatttatcctctaaaatgatatactattatagaatgtcccctggggttgtggattatttaacggggggaatggtactataattacataggttggaggtaaaccccatggctcagattattttaaatgtactgattgtcattctaatcattgctctggttgccctggttgttctctactttctgggaaacaagctccagaagcgccaggtggaacagcagcagctgttagatgcagctgcacagaccgcatccatccttgtcattgacaagaagaagatgaagattacccaggccgggcttcccaaggcagtgactgaccagacgccaaagtacatgcgctgggcaaaggtccctgtggttaaagccaagattggtcccaaggtcatgacccttattgcagacgggcgcgtatttgactctctgccggtgaagaccgaggccaaggttgtcatcagcggtatctacatcactgagatcaaaagtgtgagaggcggcgcgattccgactccgccaaagaagaagggattcttcgcaagatttaaaaggaataagaaagataagaaataaaaagaagcggcagctgcgccgcttcttttttatatttttcttttactgctctctgtgtactgcgtaccctgtaccctgtcactgcggacaggactggacatccaggcggatgctgcaatcggacagatgctcataattgatatccagggaataatccacattcaccagcaggctgtccggttcttcatttattttaatccggttggcctgtatgcctaccaccatatcgcccaggggagtggtgtagcatgaaagattcttcttgttcttctcaaactgcatgtgggtgttggcgattccctttttaattatgtccattccggaaggggatatcttgattacgttcttgaccttacctgtaaagccttccatcatctcttcgtagaggatgtaatgctttccattcttctgataataatctccccttactatcatctccacatcggagtcctcttcgtctatcatctggatgccactgattgtaatcagcacgtcttttgtcatattccttcctctttcccttaagtgtatcgttccatcccatgggccatcagcatatccaccagctggtcctttgtgatccctctggcttcccacagcatgggatacatactgatggcggtaaaacctggcatggtattaatctcattgaataccacttctccgtcatcctttacaaagaaatccactctggccagcccatagccgtccactgcacggaatatgtccatggcggcctgccggactctctctgccgcccctgccggcagctccggatccgtcactgtcctggattcttcgttataatacttggcttcaaagtcataaaactctgcagcggccagtatctctcctaccccggatgccaccacctccttaagtccgcctccgaatacagcgcactcaatctctctgcctatgatggtttcctctaccaatatcttgcggtcatgacgggctgcctctgacagtcctgcttccagggcctggcggtcatccgcctttgtcacgcccctggaggagcctgcattggacggcttaataaatacgggataggaaaaatgcttctccacccgttccaccaccgattccatatgcacaagctgttccctgtacactgcctcgtatgctgcctggcggactcccaggtcatccacgataatcttggtgtacagtttatccatggacactgcggaagaaagaaccccgcatcccacatagggaatcttagccagttccaaaagcccctggatggtaccgtcctccccgtacaagccgtgaagcacagggaataccacatccaccctgacctcgcggaccgaatctccgtccataaggaggatgcacttcttcgtggcgtccggcagcagaagggctgataccgttttgtccctccatgtaccgttttttacatcttccagtgaatctgccttaatccagtgtccatcttctgtaattcctacaagtaatacatcgtatcgcgtcctgtctatatgctcaatgacattgacagccgacatgcaggacacaatatgttctgatgactggccgccaaatatgactgcagcctgaagtttacccatgctagtctccttaaactcacttattttagtgattgttctacgtttatagtataacatatgtggcaataattacaaacagaaattaaaacagcattaacggccaaggaggtcttaaatcatatgaaatataaaataagcctgtgcatatccgcactttgtttttttactgcgttcctcattctcatggcatcccgtaccaccggcgaggaggccctggcatcccgcattgcccctgaaatcctccgttttcacgttctggcggaaagcgacagcaccagggaccagaatctgaagctgggggtaaaagggctggtcctggactacatccacggccaggttcctgaggatacggacaaggagcagcttaaacagtggatagagggcaacaagaccagcatcgagaccatggcacaggactggctggcggaccagggagcctcctatccagtaaagttggaattaacaagagattactttcccaccaaggcttacggggacatggtatttccctgcggcacctatgacgcggtccgcatcaccattggcagcggaaaaggccacaactggtggtgcgtgctctatccctccctatgctacaccgacgccatccacgcagtggtgcctgattcctccaagaaaaccctgtcatacctgctggcggaagatgattacgatgccctgttatccccccttgacaggacaaaacagccgcagcaaaagccggaggtccgcgtacggttccggctcatggatttatttcataaaaaaagctgagattctatcttttctggctgtccagcatatcctgaagcgcctcgtcgctcacatcgatccacacgtcctcttcctccgcattcagccccagatactgggccagagtgcgggggtcgtcgctgttattccagcggcttacataccggtctatctcctcaaagggaatttcccctgacagataccgctccttgaaggtttcgtcccccatcatttcctcccccgtgccggtacggccggctcctgttcctgctcctttatgttgcgcgaaaccgtaatttcctggttgtcgatatgttccctggcagccttctttgcctcggctatgttgcggttcttaagggcattcagtatgtgctcatgctccaccagaagcacctgccttttgtcctcgtcctttatatattccaggcggtagcggtacatctgctcacgcaggttgcccagcatctgcaccagcttatcattgcgggttccctggtagatgacatcgtgatactgctcatctgactgggcaatgctcatggcttcccccctgtcaatggcgcttttaaagttaccctgcatccgttccagttcagccatgtcatcctccgacatcctctggcaggccagctcaatggccagctcctccagggagcggcgcacctccagcacatcccgcaggctcttctcagatatcttggccacctcggcgcccttcctgggtatcataagcaccaggccctccagctccagcttacggatagcttccctgatcggagtcctgctgacgcctaatttttcggccagctgaatttccatcagcctttcccccggagccagctcccccttcagtatggcctgccgcagggtgttgaacaccacgtcccgaagcggaagatactcgttcatattaaccttgaaattattttccatttaaaatgccccctttccagcattatgccatgtcctgtccattccttttcacattaaagaaattggtcagatacacttgttttgccagctccgatgccttgccgaaccgcagatcctcataggctgcctgggccgcccttggattggcaaaaaggccgaataccgtcggaccgcttccgctcatcattgcccccaaagccccatagtcacgcatgacctgttcaatccttgaaatagccggataccgttctccggtgaccagctccagcacattaccgaacctgcctgccacctcccgcagattctggctgcggatagcgtctatcatgccgtctatgtcaggatggtccgaaggcgcaagcttcatggcgtccagactctcatataccaccttggtggacacgctgattcccggcttggctatgagcacctggcactggggcatgggaggcaggggcgacagcctctcgccgattccctcggacagggcagttccccgcataaggcagtaggggatgtccgctcccagggtcacgccccgttccatcagttccccggtggacaggcccaggccaaacattttattgactccaaagagaacagatgcagcgtccgtacttcctccggccatgccggctgacacgggaatgaacttgcgcagatggatggacaggccctggcgtataccgaattcctccatcagcagtctggccgctttatgggcaaggttctgctcattatccggcagataaaacaggttggtctctatcttgatgcccggctcctgggtaacgtacaaatcaatccggtcatgaagccccacggtctgcatgatcatccgcacctcgtgatagccgtcagcccgccgtcccagtacatccagagccagattaatctttccatatgcttttaagcgtaaatgttttatcatccgcggactcccctctatgtacattgtttacatttctgtttttataatacattatattgtatacaatactttcactctatttgcaagaggaaattgcagaaaaatgcggaaaaccggcagaaattttccggccggttttaataatggtaagaatcagattatttccccttcagattccgaattgcttccttcatctcctcatcctcttctcccagcaagggggttgcatctgtatgctcctgctcttcctccttaggcatgtacttcctaaaaatagcagtgaagaaatacgagtttacaaaggcaatgaggggcatcccaaacaggaataataacatggcaaactgcgggaaataaaacagcccgaaatatgtggctgccgcgattcccagatcagtggccagtatcccgatagtctggaacaaatggcgcacggacataaaaaacgcattgaacagggtccgcttaaccggattatagaacctggcctgcagcggaaacacataggtaatgataaacagataaatcaaaagcaatccgccggacaccgcggtcatagctgtcctaactgctccgtttaaagacatctgacctgacacaaagaaccagaaatcaaagccaagcacgattccggccgccagcaggataagccatatggctgttgcctgcttaaagttgctcttaaaagaccggaaaaaggaccgtatggtggaatcatcctcatcccgcaccagttttaaggtcacataatagacggcagtggtggaggccccggctgtaaacacaggaatggaacagacaatccataaaatgttcagtatgattaagtctcccagctttcctataaaccgccacaccggattatcataattaaatataccttgcaacataagcattcctcttctttctgtaaatacacctggtgatattctatcatattaaggggaaaatgcaaagggctgccctgatttcatgaaatttttatattctccttaaggccggatgtggtatacttacatgaaacggcctgtccgtgcaaatacagcagagagaaacggaaggaatgcataagctatgtccatcagagaagaagcagaaaacgaacggcagaaactgaaaaacatgtcctggaaagacagggcctggtatgtgtgggagtattataaattccacctcctggctgtgattcttgtcatcggcgtcttaagcaccataggcaccatgatataccgccagacctttaccacccgcctgtccgtggcgattatcaacgaccgctccgcaggcgcctcctccagcgccctgctggaatccgatctgcgggaatacctgggatgcggcaaaaaggacctgattgaaataaacgagggactgatggtggattttaatgaggaatccacctcccagtacggatatgccaccctggccaaaatttccgccctggttgccagcaaaagcctggacgtggtcatcggggaccagtccgccatagaccactacgagaccgtatccgcttaccagaacctggaggaattgctttctcctgagctttatgcacgggtgaaggaccatatctaccgggcaaaggacggcgggggaaaccttacgcctgttgccctgtccctggaggatacggctttgggagaaaagacaggcatcatcatggatcctccttatctggccgtcatacaaggctctccccataaagaagctgccattcagatgattgagtatctgtttccataagacacgtcattcccaggccttccgccaccttgcgggaggcctggttttctctgcggatcagcgcgcagagccggactcccagcacctcatggctgtaatccgcaatggccgtcacagcttccgcgcagtatccccgctgccggtaaggaaggaaaacatggtatcccaattccagccagggaacagactgtcccatggaatccagacattcctccatctcccttttaagcctggggttggacactcccgccagccccaccagaacctggtcgtccctgcgtaccagggcccatgtaccatactcataaaagccgtactggtttctgcagtacagttccagtgtgtctcttaaacggaatatggcttcctgaggtccgtactcctcctccggaatgagacaggcatcatccgcggtcagctcccgtatcagcagcctgtctgttctgcatatattccacggaagccccagatggcggcgtatcaccagatccagcagctcgtccgtggcatcctcaaagtccggtatcacatagggaatgccctttaactcccggatgcctgtcctctcgctctcaacgccaacaacggccctcccggcagctttcgccgccagaagggcctcaggttcgtctgatatgactgctgtacaggtctttccgtctaaacagatactacgctctgttaccatattaccgcctcattgtcatattagccggggatgccttcaatgacaattcccatcagcacttctccggttccggataatccgccccaaaggtttccactgtcatggacttaatcctctgctcctgcaggggacggtcactgtaatcagtctggacatccgcgattttattcaccacatccatgccctctgtcacctttccaaaggctgcatatgagccgtccaggtgcggcgatgccttgtgcatgatgaagaactgggaaccgcctgagttgggatgcatggctcttgccatggaaagtacgccctctgtgtgcaccaggtcattcttaacgccgttctgtgcgaattctcccttgatggagtagccaggaccgcccatgcctgtgccctcaggacagccgccctgaatcatgaagccattgatgaccctgtggaaaatcagtccgtcataatatcctttttttacaaggctgataaaattgttcactgtattaggagctatttccgggtataactccgctttcattacatctccattttccatggttatggtaactataggatttgccattttgtctttctcctttttcaattagaatctttatccactatagcaaattctgcgggctttgtccagcacggcttcactttatccatctcctgaggagtaacaaacagcgctgcctccgaaagtccccagactaccatggaatcgcgcaccagctccagcgcatggcagtagcacagggacaaaagacgtgcaaactcttctgtatctccggcctgcaggcgccggaatgcctcatggctgatttgattcagctcattgcctgcccggattccattctggtaaaaggagtaataatacccccagtgaagtatgctgctgacctgccgcagtataatttggtatggttccagggtaagatcttcaatgatatggtgcatcaggatactgaggggcaccgcataaggtcctgcaagctcctcctctatacagtctatctcctccctcccgataaaaggcgccgccagcagggccgccggagcggatgccagggccatgaactggaggccgctcagatacataaggatatcctttttgtgaaccttgtttttcatggactgaaaggcagcctggtcattaaacagggtcacctgtgttccctttacattatacgtgcggcagaatcccagacggttcagcatggatatggacctgcgtatggtggcaacggagacactatactcctgcgccagggccgcctccgaaggaagaaaggaaccatccttatagaatcccagtccaatccggtcgatgaggtcacgggcaatctgaatataaaggtggtcatgcccctgagcgcaattccatgaatatccatttttctgctctatgtttcctgtttcaaacctggattcaatccaatccagatacctctttatgtcatgccccagggaccggtacatgcgtgcaaactgttcctgtatcatccgggtatcaccggcagacactgcctcggtcatccacatggggtcatcatattccccgcagcaggaggaaaagggcggcgtgtactccggctccaggaaaaaaggaattctggagccaatctcaaggctggtgaatatatccctgaacagcagattatgggacgcatccagcagattataaagagcattggatgaggccttccatctggcacgtacttccttccttctgtcccttttcagccgtttgaaatattccacagcagtttccacaccgcatacctggacagataatgcaaacatcctgggcatcagcaattccattgtcttataaaccgccagaaccgatgtctttctctgaagcactgccagtatatcgggtatatagtcctcttctcctgttttgccgtatacgatgacagcaggtctgcgttcctctgtccgtatcattccctgatcccttaattccgatagcacatccctaaccgtacggattcccacatggtaggtctcgcacagccggttcatggacggcagggcttctccatatttataataccctgtctcaatctgttccctcagattttcatacaggtagtcatgcagcgtcttttttcttttcattgccacccctcccggacacccggcatgttctgcccgcctgctgttccttataacagtattataccacgtattaatttcaatactatatgtatatgtacacaaatattgcattgatttatcaaatactgtcacttaaaataaaactatcaaaatttattgatgttagactgttataaatatggagtttacttggaaatgaaaaaaacaaaagattctatatcagatgattatgagaaaccattattcagacgcggatggtatataggattcctttccctggtcctggtctcagtttttgccctttccatcctgaatgcagccaagcttcaaatcgagttggaccgctctacccagggctatttaacggatgtgacctcccagttgtcccgcgatatccgggatgccatcaataacaagataaccaatctggtcatgactgctgacagcttttcgcagtttacagaaaaacaagatacagatacaatgtcaggctttctgaaccgcgcagcccagattttggaatttaaacctctgattttctttgacagggagggcttttctgtctcctcacagactgacgatggtgaaccccctgtatccccggaggactttcttaagcttcccagtgtccgggcctcttttcagggcagcatacaagccagctatataggtggaaaaagtattttttattccgtccctgtctatcgggacaacggagtagacggggttctggtgggtgttcgcagcaaggaaaacatgcagtccctcatttcctccaaaagcttcagcggccagatgctgagctgcattgtggacagccaggggcaggtaatcatatctcctacggatctaaaaccctttctgcagctgggggatatctttaaacaagaaaaaaatgaaaaaataattacagacatacagaagatgcagcgggatatgacagaaaaccgcagcggcgtcctgaaatttactgctaccacaaaagaagaactgctcctctcctataatgcccttaacataaacgattggtttctgcttaccatcattcctgccgatatcatatccaccgggacaaaccaatacatccttcagtccttcatcattataggggctaccatacttatattctccctgtttttatttgcagtattccggttctataacgcccacaaaaggcagcttgagctgattgcatacagggatccccttacaggcgggcttaataacgcggctttccaggccagatacagggaactctcaaaaaacatgaccccctgcacctattccattgtgcttctgaatgtccggggatttaagatggtcaacgagcagttcggcatccggatcggcaaccagattctctcctatatatataaggtgctgaagcagcatctgcgtgaggagcaggatgaatttgcggccagaggcgaatcagaccacttcttcctctgtctgaaggagtacagccccggagccatccaataccggctgaatgatatgattcatgatatcaacaactttcatgatacggaacttcccgacctgtccctgtccttcaagcagggcgcttgccttgcagacgacccgtaccaggaaatcactcttctccaggaccatgccaggatcgcactgcaaagctgcgggacagatttatgccacagctgctgtttttatgatgaaagcctgatccggaccctgaaaatagaacaggagttaaacgcgctttttgaggactccattgaaaaccggtattttcagatttatctgcagcccaaaatcggactcagaagcggccggctggaaggagcagaggcattggtgcgctggaatcatccccaaaaaggaatcatatatccatctgattttataccattgttcgagaacaatgggaaaatatgccggctggatctctatgtattcacagaggtatgcgctgccatagaccgctggagacaggaagggctgccgttgataccagtctccgtcaacctgtcccgccagcatttccggaatcccaatttcctggatacctttgcaggaatcgcatccagctttaagatacccgataaaatcctggaattcgagctgacggagtccattttctttgataaccagcagatcaagacagtcagagaaaccattcaggaaatgcaccgcatgggctttctgtgttccctggatgatttcgggtctggtttttcctccctgggacttctgaaggagtttgatgtggacacactgaagctggaccgctcctttttcctcaatatgtccggtcagaaagcaaaggatgtgatttcatgcctgattgatctgtccaggcatttaaaggtaaagactgtggccgaaggcatcgaatccacggaacaggttgattttcttcgcagcatgggctgcgatatgatacagggatatgttttttccgctcccatacctctaaatgagttcgagaagcgttatctccaggatcagccctagaattcggcgcgctgccggttcaaccgtttaaggctcctgcttgcctgccgcctgcaaaaaggagcaagcccgctttgcccattcacacttcgttcatatttcattcaaaaaccttttacacaaacaacattatttcttcatgtttaagctatatactttaaacatagcaaacaacaagagttgctacacaaaaaacgcttacaagatttttttcataatactcgagctgataagaatttatcagctctcctcccttttaaaatacttttttccagaaggcgtatcatcctcaggatggtgcgttttttcgtttatccgtggtccggggcagagctaaatcctgcccctgtttctttttttgaatcaggacgctggccatactcttagtcccgccttcttaaaaacccctccggaagagttacttccctggataaaaacagaagggctgtcaggttggggaaggccatgagtccgttccatatgtctgacagcagccagaccagtcccagcctggcctcgcttcctaaaaatacagctgcaataaacaaaagaggatataccttggcagcaaacatgtgctgcgcattttccccgaacccgcaccccccgatgaaataggccgcagcctgcctccccagataaaaccaggccatgatcgtggcaaatgcaaatactaccatggagccgctgaccagatattctcccataattcccagccgtctgctaaaacaccaggccgcaagggctgctccttcataaggtattgtctccgggctggaaccggtcatgcacaggattaccagggccgttagggtgcacaggaccacggtgtcaaagaacacctcgaacatggcccacatcccctgttcatgaggcgttgtgccctctgtgggtccgtggagtaccgccagcgtgccaagtccggcctcattggagaataccccccgcgagatgccgtaacgcacgctgcggctgattacatatcccgctgtccctcctgctgccgcttcaggccggaaagcggaggttaccatggatgccagtgctccgggtatctgttccagacaggaaagaatcacaatcatggaaaaggcaatatagattccggacgccgcaggcaccagtttttcagccacatttccgattctgcggattcctccccaggtgaccagcaccagaaggccggtaaatatcagaccgcctgccagggccggtacatgccaggtgtattccatggtgctgattgctgagttggcctgaaccatgcttcccattccaagagagctcatcaggcacaggaagctgtacagcactcccattcccctgagccccagtcccctttccatgtatataaacggaccgcatatgtaatgtccgtccttatccctgtaccggtacctgattcccagcatggtctctgcataagcggttatcatgccgatcagggctgatacccacatccagaacagggcgcctggccctcccgctgtcagcgcggttgccacccctgctatattgcctgttcccacagttgccgccagcgcggtgcacaccgactggaactggctgattccctttccttttccggtgccgtcctccttcctggacgcttctcccgatataagccgtcctgctgtgcggctccaccagaataaaaatcccctgatttggaaaaaatgacatttcagggtaaagaatatacccaccccaaggaatatgacaagggtccacggcccccacaccatctggtggacctgctctaatacattcatcatctgaacttatcctgccctgcttacttcttataaatgtcttattccgaagttcccctgactatgaccgctggaaggaattttcttttgtttccggctcgcatttcatagttgtttatgatagaatatgtagtaggaactactgcaagaatccaatagaaaagaggtatgccgatgccaggttttacaacacactatgtcttgggcatgaaagcatacaatgatatgcctcagaacaatctgaagtttatcattgccaagtatcggtggctctatcagctgggtctccaggggccggacatgtttttttataacctgcccatcctgcgccatcgagaccaccgcaatgtaggttcctatatgcatgaacaccatgtcaattactttttccgttgctgtttcatgcagctttcccgaatcggttccaggcagcagcgtgaagaaggcctggcctacatgtgcggttttatctgccattatatcggtgactctatatgccacccctatgtatacggacgcattgaatacgatgtcaatcacccggggtcctattaccacggactccacgccaagctggagaatgacatagacgctcttctgcttcagaagtacaagagaaagaagccatcccagttcaaccaggcagcaaccatctgtctgaatggaatggaaacccaatttatttcccagttcctgtcagactgcatcaacgaagcattctatccgctgagctataagaacaggtaccaggtcacggctcctatgatacaccgctccattctggctctccgttttggatgcaggactctgtctgaccctaacagcagaaaaaaggacaggattgcattttttgaatccctgttcctcaaaaatccggtagcctccagcaagctggttacggataccgtggagaacccggcctggagcctgaacctgcatcatgagacatggtgcaatccttgggataagagtattgcctccaagtcctccttcccagacctgttcagacagtccctggggaagctgagcactatcttctacatgatcaactccatgctggagacaggacagcccttaaagctgaacgcccttgagaatcttctgtccgagctgggtaattattcctaccacagcggacttccctgtgcagatgactgaatgccgcagaacagcggccagggcaagtaagtcaataagcagcatagacccgccaaccaaaagagtattaataagtaaaaagccgcggctccttttcctgaggattcaggaagaaggagccgcggctttttgctgctggtaatttctgttattttacggcttctgttgttttacaatttctgccatcttttggttgattcaatgcacgttttattcgattacctggtcgccgtccttaatgcagtaatttgcattcacgccaaggcggaccatccagttctttgtctcctgtgtaagccagatgccgcttccggatccgccgccgttgtcattatcccacagccactggggggtgggccagagagcaacgctgggtcttaacgccttgtagacctcatatcctacgccgttctgtccatggtgggccacctggacaatatcacacttaagggcgctcagatcatggtcggccatcagctgctcgccgcctgatttagccaaatccccaaggaacacggtgtttgtcccattcagggataccatataggccacgctgctgttattgacaaaatcattgttcatcttatatgcctgattcaatacctgaatcctggcagggcctgcctggataacctgtcccgacacaatatcaccgtgaaggatattctgaggcaccagaccaaaggctcccttgatgtaggccaccatcttggcgacctcagggtccttctcagcataccagctgtcctctgcaaaggaatagtagatgccgtcaatggtaatctctccgttatgcttgtacagaatgtcggccaaagctcccacatggtctgaatcagggtgggtcagaagccatgcctggacatgaccgcccttctgcttaatctggttcagaagataatccgtattattggtccagccaccgtccactacgatgagaccgccctcacctgtctcaatgataaccgacagaagctgggctgccgtgtcgtggttggccagcatggtgagacggccggccccgaacagggaagtggaatctgtcttgggagtggtgacttccccaaatgcggcaatctgagccttggcctgaatgaccggctggctggcagccgctgcctgggatgactgggctgtctccccttcatccctgatgatgattttgtccggggaagacagcatctgtccctgggcctttagcggctgggagttggtcatggccaagctgtccagattccctccggtcattgtcagtgtcatgatggccagcagcccggcggcggcctgtttccagtatctgtcaatcctcatcccaatatctccttaatcatctctttactgaatctgagccgtcagctccctctgttcccctgccttcataacgtcgtttacaaggtatgcgctttcatccccctctttgtcgtaagggaacacctgaacaagcacgtcatgctcgtcaaagtaactgccgtagtaagtactgtccgtatcctccgggtctggcgcttcataatagaaattctgctccgcaatgtaggtgcccactgccttcagtacttcctggccataaaccacagcaatatcccctgtggtcttatgggtcacgggaagcaaaacaacgaccctgttgctgccggcgtcatacttggcatccagatccatcacataatcagcaaacaccccgtaaggctccaggaactgatccctgaggtcttcccttacctcctgccagtcgatgttaatatttttatcaacctccaggtcaggctgtccgtccccctgaaccacaccgttgctgggagaaacaatgttgctctgggtacaaccgcaaagcagggccgctgaagctaataatatcaatgataatttctttaattttctcatgatatggtaatcctcctttttgtcaacgttactattatagctaagattacaataatttaacagtccttttttcttacaaaattattgatgtttttacaagttcctcttgatttttccaggaactgatgataatatgttcaatatgtttaatttaaatcaatttttgaacattcaggaggatacagccatgaaacaagataaaaaccgcagtatagacactccattaaagaacagactggactgggtcacaaccatcattccctttgtgaccatactggccctctgttccctgttcatgatattcccggacgcctcatcccaagtgcttggttctgtgcgatttttcctgggggaccagtttggaggctattatcttctccttgggctgggcgccttaatctgctccctgtacatggcgttttcgcgctatggcaaaataaagcttgggaatcttgaaaagccgcagtattcctcctttcagtggggttccatgatgtttacggcgggattggcagccgacatactgttctactccctgtgcgagtggatgctctacgcaggcgagccccatatcacagacatgggagccatgcaggactgggcatccacctatcctctgtttcactggggccccatcccatggagcttttacatcattctggctgtgtcctttggctttatgcttcatgtgcgcaagcggaacaaacaaaagtactccgaggcatgccggccgcttctgggcagacgtgtggacggtgttttgggcaaactcattgacctgacagcggtatttgcccttctggccggcactgccactacattttccctggcaacgccccttctttccatggccttaagccgtgtgctgggcatacctgaaaacaatttcctgaccatcggcatcctggtcatcatctgcgttgtgtataccatggccgtatacttcggcatgcagggcattgccaaactggcagcctcctgcgtgtacctgttcttcggactgctggcctatttccttttgtgcgggggcgagacacgctatatcatcgagacaggcatcaccgcagtggggaacatggtgcagaacttcgtgggcatggccacctggaccgatgccatgcgcacctcctcctttccccaaaactggaccatcttttattgggcctactggatggtatggtgtgttgccacccccttcttcatcggcaccatcagcaagggaaggaccatccgccagactgtgctgggaggttatttcttcggtctctcaggcacctttacatccttcatcatcctgggcaattacggacttggactgcagatgcacggaaagctggacctgatgggtgtctatgcaaaaaccggagatctgtaccaggccatcatatccatatttgagacaatgcctgcggccaaggccggactggttctcctggccattaccatgattgccttttatgccacttccttcgacgccctgaccatggtggccagctcatactcctataagtccctgggcgctgaggaagagcctcacaagcaggtaaagctgttctgggccatactgctgatgctgctgcccatagccctgattttcgcggagaattccatggctaacctgcagactgtgtccatcatagcagcttttccaattggtttcattattgtcatgattgtatggagctttttcaaagacgccgggcactacctggacaaagagaattccgaaacgcgaaatatggaataatgtaattgaatggtataactggatggtataattaaatcgttgcaaacatcataaaatcaataaacgaggaccggtctccctgtcctcgtttaattttgtacacacatagttatgtacgctccttatccttcattatcctcccacagaatcttctgaatcctgtcctcggcctccagctcgtcacttcccttaaagtaaaaagtcagaaaacctgtcattctaagattctttacttcgtcgtattgcttgacatttgctgtatacttatcgctggtgacaaaaatatcgcagtcaaattgatttgccgtctgaatcaaataagaaatagggattggcctaaagactctttccctgctgtcaacttgtttcgttaacatagaatcacctcaattcaaaacaaaaccgactactggttaccaccctcctctgaataattatacatgcccctatgtacttagaataacatttttttccactaaattcaagggattgacgcattaaatttatatagtttttgtaaattttaaactaaaagtcagagaaaaaccctattttcacctccgttttgttgcaaatgtaacaaagctggtaaaaatagggttttactgtaatttacatttaaccggcgctaacgctgacgccttttacagcccattgataattgcgcagtgcctgctggagattcaggtcagcacacttaaatccggactgggcctggagataggccagctcctgctgcatgaactgaatctggctcagcgttccattctgcctctgaatctgcgctgcattccatgtgagctgggcgctctggtacgcagtggaggctgaatcataggctgcttttttctccagtatggtgtcatacaatgtctgcatatcagaacggagctggtcctctgagtagtccacggtacgcatcttattggccttctgcgtcatttctttggtggttcggacctggaagtcgctcatccctgaccctgaaccgctccgcatgctgatcaggctgtagttgttgtttaccgcggtttccttgtcggatgtcaaatccagggttccgataaccgatgggtctgctgccggaaccgggccaatgacagtatccgcgcctttctcccatccggtgtagtaacagagggtcttatatatctggtcaattcccgcatctatactctccagctgggattttgccgaggacagctgggctgcggccgaaagcacgtctgcatccaccgcaagcccctgggcctgcatggtctgctgtatggcctgggctgtctgggctatctccaatgccttggctaccacagtcctctgtgccaggtaatactcatactggttcatcagagtctccgcaccggacacaatcatgttcacctggcggtccacgctccggctggacttgctgcgctcaatggaacggtccatggaccctgcgctggaacgcagcatcctggcacctcccaccacctgcatgaccgcaggattaccgctgcccagaacatctgccagctggtctgcctgggacatataatcatcagccaccactcgcatagccgttgcaatgcttccctggtcctcttccatggtatcaatcatggagtacgcgctttttataggggcatagcagttcttaataagatctgtcaattcatcgtactccatgtggctgtcctggagccgggccatggcctctgtgtacgtatcacccggcaccactcccggctcgtctgccagcgcagcgcctgcaccgcccaccgccatcacggctgccagcgacaaagccatgaagccttttcgtctgttcatattcatctgtccaacctccttacctttcttcaaccggcctaattggaggttgtgagaccttttacattccaatcataggcttccatggccagcagaagctgaagcttatctgtctccacactgttcttggcggatatatagctgttaagcacattctggtattccagctctgtaatttcgcctaccgctctcttggccgttgccgtgttcaggttaacggaggcaacatccagggccatcacggccgcgttcagggaatcgcgtcccgtaagcactgtattgtactggtttctaagggatttggccgccttatcctttgcatcctggatctgtgcctggttggagtcaatcaggtactggctggtcaggttgccggccttcttctcaaaatatttcacatcataattattcgcgatggccgtctccatatcagcgtccggattcatagatgcaatccggttcaaatcaggctcgggcacatccctaatctcaggctgtccgtccactgcccatcctaacatcagacagagactcctgtggacattgtcagctgatttctgtgcagtaaggatagccgtatcctggtcctgtacactctttaatgcactcagcacatctgcctgggttgccatgccggctgcctggcgggctgcggttgcttcatactgggcctgcatcagattcctggcgctctgaagattttccatattgtaccgtgactgctcataagtcaccatcagctgctgggcctgatacacaagtcctgcctctgtctggtcatactgaatcttctccatgtccgcgtcctgatagttattgtcggcctgctgctggagtacgcccacctggaacctggctgtggcccatgccacgtcatcgtcgctgtctgcattattccagatggcatcaatatcatccatataatcatcgtaggccgcattcaggtccttgcccttctgatccttataggtagaccggttgctgcggaccgttgggttgtactcatgcaccaagtcctttaactccccgaattccagcacattatccctgagggaggcccatttatcctcactgtatgcgaattcaggacttatatccttgttgatatcaggtgcaggcggctctgcaatcgtatgggcgtcatccggcttgcttacattgggccttttcccgctggccgcaaatgaggtcaggggcattgtcccggccatggtaatggctgccaggacagctgctgcccggtatccgtatttcctgttccttaaattcttcatctcttatctcctcttttctgtgtttccttatcacgtcagtttccggtgttacggcagacaccgtattccattataagcatttccttctttgtcacttccagaagtttttcccggtccaccacgttcttataatacagcgttacagccctgatgatgataagcatggccatgtccaccagatacgacagagtctcttcatcaacaggataacgttccctgtcaatcccttcataaagcttatgaacgaattcaccataggactcatcctgaagcagaaagcccttgattccaaataaatggttctggtccaccacacttaaatccgacagcatgttcctgtacatcttatagcccaggcctccatggtcctcatccaccactgcctccagaagcttaagggctgtgccaaagggatttcccccctgttccttcagggttctgaagattctctcctggcagttatccctgaagcctctgagcatataccgcatcaggtcgtccttatcttcaaaatatgtataaaagctccctctggatatgtctgcctccttgataatctggttgatggatgcagatgaataaggaacccttgagaattcgtggaccgccgcttccagtattgcctgcttcttctcttcctttagtttcaaaaaccgttgtgtaggcatgaatccagcctcctagccctcttttgtaagatacaatcatattcctcttggtgacataatgtcatttgtgacaatatgtcacgaacccaattataaacacatatgccatggattgtcaagaaaggaagaattaaatttccataaacagaaacaggggccgatggtccggtccctgtttccacagttatagtacacaataccaaattcaaaaatcaaaactatctttacatattctttgcagcatactccttggggagtgatgattcatcatccatattctccgtccgatccacaatataaaccggcctgtccttcagttccgtaaacagaatcgcaatatactcaccgatgatgccgataatcacaaacatcatggcaaacataaagcaaatcaaaaccacaatggtggcatagccgctgggagcaccttttctggtgcagagcgtgtatatcatgacagccaagcccagcagggccgagaatatgcctgcgtagataccaagcttcaggggcatgttggaaaagcacaggattgtattgatggaaaacacaaacagcttcttgatgctgtacttgctctcccctgccacccgggcccttgcttcatactcaatggcggttttcttaaagcctacgttctgcacatagcctctgaggaaacgcaccttctccctgtagctgttcttcagcacctgggccacatggcgcgagactgcaaaaaagtcagaggcatttgcctcaaagtgtacatctgaaatccggttgataagccagtaaaagccggaggaagtgatgttcttcaccagccctgccgttctgtttttggtgcggaccatgttgataacctgatatccttcctcaaacttagccagaatatccggtatacattccgggggatgctgcaggtccgcgtccatacagatgatgccgtctcccctactgtagtccagtcccgctatcatggccgcctcatgtccaaaattcctggaaaagcttatcaccctgacccttgaatcagatgcggccatacggtccagtatgtcctggcttccatccctgctgccgtcattgacaaaaagcagctcataatcccagctgatttgttccaacacatgtgtggtttccctgtaaaattcttccaatgctttttcttcgttgtagaccgataccacaactgataacaacctgtccatctcttttgtctgtaatcctttcctggggcatgtttacatatgctgccaatctctctgtcctcatccccccagtgcgtgtctgacccccgctccggcacgctctaatcaaaaatacggatttgctggctggagtgggtgggcacccgtttgtcctccggcggcatttccatgtaattgccatacacctctgtcagtatctgatgccatcccttaggtatcatcaggcgggtatcctcaaaatccgagtcctccacctggtcgcagcaggatttatccacagtcacatacagataatccggctgatagttactgtaatagcgcagactccccttgctgtgcctgtccttcagggcagctgccttctgcatggcaaagataagcttcatgggcaccaggcggcctgcagcagccagccctcccacgaagatcttgtgaatcaggctgtatttgccaaaatccagcttatacctgtgccccatggccatgccatacactgccttgtgcaagaaacgggtaaattccgcccctgccctggaggcaggaagtttgtccagaatgaacagatccacccatatatgattcagctttccctcatagtactgcatttccgggctgtcctcatggcatttactttttttgtaaatgattctgggagtaaaatcataaaatgcctttccgcccctgtaactgtccggctccagcagctccatggtatccggcagctcccttggagccaccttcataaatgcctcatactggttcctggtaaacgccacatccgcgtcatcatcccaggggatgaaccccttatggcgtacagcgcctataagggtgcccgcgtccagcatgtagcggatattatacttgcggcaaatccggtctatctcttttaatatggtcaagttagcctcatggacccggctcatatcataggttttcatcataatcagcgctcctgccctttattcctgccgtgtttacggcacggtgcctaatcggttcccgcagagtccctatgcgcactccactgcttccttaatagtcctggccatatagtcgatcatctcatctgtcattcccggatacacacccacccagaatgtgtcggccataatgcggtccgtgttgtccaggctgcccacaatacggtatccctggcctgctgcccgcatttcatcaaaacagggatgctttgtcagattgcctgcaaacagcattctggtctgcacgccctttttctccacatactggacaaccttattccgctcaacgccttctctgcacgtaatcaggaaaccgaaccagctgggcctggaatgcgggcaggcttccggaagaatcagctgtttctctgttccctcaagtcctgccttcaggcggtcgaaattgtgacggcgccgctccacaaaggatgggaatttatccagctgggcgcatccaatggcggcctgcatgtccgttgccttcaggttatacccgagatgggaatacacgtatttgtggtcataccccaggggaagctccccgaactgtctgtcaaacctgtgtccgcacatattgtcgcggcctgaggggcatacgcagtcgcggccccagtcgcggaaggatcggatgattttattgagaaggggattgtccgtatagacagcacctccctcgcccatggtcatgtggtggggcggatagaaactggatgtgccgatgtcaccgatagtaccggtaaaccgggtcacttcctttccgtcctcttccatggtatactgggtacccaaagcgtcgcagttgtcctccaccagccacaggccatgcttctcgcagaatgccttcactgcctttaaatcgaaaggatttccaagggtatgggcaatcatcactgccttggtcttttcagacagggcctcttccagcttttccgcatcaatgttatactggggaatcgtcacatccacaaacaccggcactgcgccaaactggatagcaggggccaccgtggttggaaacccgcaggcaaccgtgatgatttcatctcccctttttaccctgcgctcccccagcaaaggggatgtcagcgtcatgaaggccaccagattggcggaggaaccggagttcaccaaggagcagaaacgcacgcccagatagtctgccagcttcttctcaaattcatcggtgtatctgccggaggtaagccagaattccagtgagctgtctaccaggtttaccatctccttatggtcatagaccctggaagcgtagggaatgcggtcaccctcctgaaaaggcccctttttattgtgataggtgtcgcagtattcggccaccatgtccagaatctgctgccttgcttctgtctctgtcttatgttcaaatgccatgttcatttctcctctttacgaaaaaaattctgttatctgccggtccataacctccagcatatcctcaccgtccagataagccctggaccactctactgtcttttcaacagcttcctccaccccatatctgggacgccagccaaataccgactttattctggaacaatccagcttcagaaaattggcctcatgagggcctccgtcatactgattcacccattttacatccccgccccagagccggcagaacatatccaccaggcatcctgtggtcacgcagtccttatcgtcaggccccacattataatacccctggtatcgtccatcctcatactgcctcatggcaatggtaagatacacggccagcggctccagcaccagctggtagggcctggtggaatggggattccttacaatgatatctttccctgttgcagctgccctgatacagtcaggaataatcctgtcgttggcaaaatcgccgcccccaatgacattgcctgcccttgaggtggagacagcacaccgcccgtcaccaaaaaatgatttctgatagctgtgggttaccagctcggaacaggacttactgttggaatagggatcgtatccatccagaggatcgcattccctgtacccatactcccactcccggttctcatacaccttgtccgtggtcacattgagaaaagagcgcacactgtccgtcagtctgacgcactccatcacgttcacggtccccatgacatttgtctcataggtatacaccggatccttataagaatccctgacaatgggctgggccgccagatgaaacaccacctccggcctcacccgttcaaacacatccctaagcccctgtagattccggatatctccaatcacgctgtccatcacatcctccagcccggcaatctcaaacaggctgggatccgtaggcggttccagggaataccccgtcacctgagccccggcaagcgtcagaatcctgcaaagccaagcccccttaaacccggtatgccccgtcacaagcacccttttatctctataaaaatccatcaattccttcatcttcataaaaaaatcctctcatccaacttccaaccatccacaaaaacccttccgaaccacctaccgcacaccatctgctgctcaccacttaccgcctaccgcacaccgcctgccgcacacaactcccctcagcatcttcttcctacggcattcgaggaagcccagcatggttccaggcgtgcttcctgctgaaaccattttacacgccggcacttaggcgcggtctttcacgcgtcttagtaccgctgcgtgtaaaccgagcgagagcgtgtttcatcagggagcacgcctggaaccatgcggaccccccgcgaatccccacgtccctcctctaccaaatcttccagggcgccctgcccgactgccacaatccctccagcttattcatctcacgctgtgtatccatgcactgccagaatccgctgtggtagaaggatttaagctgtccctccgccgccagtttctgcataggtccctgctcgaacacagtggaatccccttccagataattaaatatctcaggattcatcaccatgaacccgccgttaatcagggcaccgtcattatcctccttttcccggaaggacagaaccgtatcattttcgtcgatatccagaacgcccttcatctgtccgatgttgactgttgtgatagtagctgtcctgccatgggattgatggaaacgcaccagttcatccaaatccactgttgacacgccgtccccataggtcagcataaaaggctcatcccccacaaaaggctggatacgctttacacgcccgcctgtcatagtgttgagtccggtgtccaccaacgttaccttccacggctcggaatagttattgtggacttccatcttattgttagccagatcaaatgttacatctgaggtgtgaaggaaatagtctgcgaaaaattccttcaccacatactgcttataacccagacagataatgaattcatggaatccgaattccgaataatacttcatgatatgccacaatatgggttttcccccaatttctatcataggctttggtttcagatggctctcctcgctgattctggtaccaagtcctcctgctaatattactaccttcatctctgtcctccattgtatttccggcacattgtattccagccgcattctattctgcctgtactctttcctgcccgcatcctactcccggaacacattcagcttgttctcttccagtatccggaacgcgttctgtatcttgtccagtcctttgcggtattcaaactctgtctccagttcttctcccctgtcctttagctcctcacggctcattccggggacctccagggccagccgggcctttctctcaaagctttcctccctgctgggcgctttctggatctcacgataagtagtataaccatttcccataaggattgcaaggcagaatagagccatgccccaccggtatcctctgtctgtcctctccttcatctgccacgccagggcaaaggtaagtataattcccaatattcccacctggaactgcagggcatagcgggaactcaacgcataactttctttctcaaatatataccgggaaatgaaaataattacatggttcatcccgcctcccgccagaagcatcagaggcataatggtcctctcatacagtcggaaccggaaattaatccataaggccatcaaatagccgcagaccacaaacaggcccagaacataacacatccggttgctgagaaggccgttttccatgaaacgttccagttcctcccctcccaccaggactcccgcaaaggactttaacagaaaacggatggggaatgtgggattttcagccagtatcgtgcccagggaacgtcctgtggctcccgcgtgttcctccaccgccatggaattgctcagcatatacagaagaaggggcagcagggcgcaggccatataggccagataccgcatatcccaggaaccctgcccccttctgcccgggcagtccttacgcttcctccggtccatcaccatgcagaacccataggatagcagcagcgtggccgcatagaccgcacaatacgggccggcagtacccagtataataagccacggcagtaccagcagctttaaccggtcccgtcttttttcctctcctgcccacacccggtccagaaccagctcatggtagtagaagcaggcaaaggcaaagaaatgggaccatccgcttccattggtaagcatttcccatttattcaggctgaacatcactgccatcagcagcgcaaaccagaggcatccgattttcctgctcctgcagtaggaggctaatacccagccggccagccccaggctcaccacgcccagaacacgctccagggttatggtaaagccgaataactccacattgacaatccggcagagataattgatcgggatgcgtgtcaggacatccggcacaaaaaacttctccggattccatacatccggcagatagctgttcaccagccggatgtagtctgagtacaccacatcgcaggtggcgcttttcacataccaaaggcagaataagatgcctgcaagcggaagaagccaatatatgattttcctgtttcgttctgctttcatggttatcctgctcctttctcattccctatgtctttcccggaaaccggttcttatctgaccgtcagatgcactatcgctgccagccggtcctctcccctctgttcctgggcattctgcataaagaaattatattcaaaggtcaggtgcaccgtctgccacggctcggcctgaatggttgtatttacaacattggaccgcaccggcagataacgcggctcctccttatcctttgtaatcctgacagcctcgccgccgctcatgattccgggatataccacctccaggtcaatcacgcctgtctcaccggccatgaccgtcaggctggcatgttcatccatccagccatcgctgtagtagccgtaatccacctggagcttcatttcccttacaatctccgtgatatcctggaatccctcatggtccgggtcttcccgcagaaccagcatcctgtcatccaccagaccgatatcccggatattttctatgaactccaccctggttccttctgctgcccgttccctgtcaaacaccttgaaaaaggttctggccgtgaaatcgctcatctcatagctgtcgcctatgatgtaaatggttttgccgaatatgccgtccccatatcttccgtaggtctcctcggccagcgaattataccgcagctggttgggccagagatacagcttgggatagtccgcccggtaatacagctccaccggaagcatgaataccacatagcaggcaaaggctgccccccagggccaaagccgtttcagatacagctccggctttactccctctgtcagttccccgtacatataagccaggaataaaagggcggataccagggatacatacacccagcgcatctccacccgtatggtgacgctggaggacgcaatacacagcccggtaaacagaatgaacagagtgctgttcttcagcatctgaacacggtaatccttccgcttctcccttacaagcttcaccacaaatgccagaacaataaccgcgatgcaggcatccgccaggagcaccagcccctttatggccaggggactctgcccccatggacagccattgagatgttccggtcccgcattgatgccgaacacataggcaatctggctcagggcgtatttgaaggtgtccgccaggctgaaggtatctgccacctgggttcctcctgtgcctgccggcagaatacttcctatggtaaaggcgcgaatgatttggaccagaatgaaggataacagaccggctccccattcccacagcttcctgctcctcttaaacagcaggaccagaagaagcagaggaaacagagccatatagcgttcatgtacaaagcataccccaaagtagagcacgcaggaaaggtagaagtatacatggctgtccttctcattgagataccggaacaaataccagagaatcataacagccatccacagggccatggtttccataagccccagcacctgtccaatctggtaataggccatgcggctgattaaaaacatggagccgcacagaaagccgattccctttgccctggacagccttcggccgatgaaatatatgctccaggacacggctgcgtttaacaggatgttaaagggcacgaaccaacccacatgattcctgaccactgccatctccagccaggcggccagataatacagaaagcggaaccgggtgctgcccaccggaaacacatactgaaggaaactctgctccccgtagcaggaccagaagtacaggtcatccatatataacccctttatttcgattcctctgttgacccacactgccatggcaagcagaatacccatgaatattacatggtccttccactcatatttcttttccatcctggagaacccaatcctggttctcgtactctcttttgcctccaatgtaagcgcctccttctggctgtcaatcaagttccgtcatgctgtagttttccctgaactcctcaagggcctgttgggaatcatccggcggtccggcgtcaagcgtaaccctggccgtcatatttccccattcatagtgaatatcagaaaggcttccctccgcaatcatatcctcaatcatctgcagggccctgtcctgtcctgccaggtatccggcttccacgaagaaatactccgtaccggcatatctcagaaactcctcaaagtatgccagccgctttaccaggtatacatttcctccgcttccggtcacatcgtagtagctctggacgctgcacggcagatccaggaccctgggatgcctcccgaatgcaaggacacggctcctgggtgtaaacatacaggaaagggtaaggctgccctctccggcccttctgtccagcatttccctgcggtggtcgtaatagcccatatgacgcaggctcacaggcgtaaagcccggcactccggcccagccagtggtacaggtcaccgctgtattcactgcaaaaaataaaaccagcaccagagacagggaccgtctgactgcgggtccccagttctgcccccatcccattctcagcgcgctgataaccagaacagcataaaacaggatgaaataattcccgtccacctgatacagagtatagatgcttgccagggaaccaagggccagaaccggaatcaggatacagtcaaagagattcaggggatgccggaggccccgtctccccgccttccaggaaacagcaagccagatgacaagaaaaaccgtcacaattccggtaccccatgcaatgattacatgggccatatcctctgttacaggggcaaacaggattccccatacccgcgaccacagccgcgaacatttttctcccgcagtcagggcagacggatctccaatcacatggttaaaggtgtaaggatatttcaccctgcatcccgccttctcaaaaaatccggcaaatatggatgtaacaggcacgccggtaagaagccatgtgcggtaccacaatccggccgccgctgctcccggtatcagaaggaggcaaaagcctctcctgtctccaacccttaaacggcgggtaagaaacagacacacaagggccactccgcccagagccgttgaaaacaccagggccgttggcttatacaccagggtcagcaggtaggtgctgacagccatggaaagccagggtatatttttggcagaactgcttttcttcccctgttccccatcccaaagtgcgaagcagataaagtcataaatgatgagctggtgcagcagcgtaatattatcgctttttgcagtggccgccatattcatgattcccggaatagcggcaaggatggctgctgccaggattccttttacctgcccgcagtatcttcccactatatctgctgccaggaggagaatccccacggtacaccacagagaaaaggccaggacaaatccataggttggagtcccgctcagagggagaaccaggacttccaggcctttgctgtaggtataaaccaggttaatcatgcccagattctcgtaaattccctttccgttatccagtacataggcggagcgcaggccgtagtggagtgaatcatagtccagttcaatgttcatgcggcccgcctgaatcagaaccatggtaatgatgaaggcaagtaaggcggcctgggccatgctctcacttcttcccttatctgcactgttcttcacagccttcagccatgccccgggtaaaacctgtttgtttctgcgtccccaaaggatttccaggaccacggccgtcagggccatgactgcggccagtcccctccacagcatcagcccgccatgtcccgtaagggatacaaggcataccaaaaccatccacagggcgcttcccagcacaaggcacatggatgtacgctgcaaaaagggaatgggagcggaaagctgcctttcttctaagaacagccggagaagctgtctccctgccagtatgagaaccgccatatatatgccggataccgccaggggcaggaaaatacggtggcaccaggtaaacagcacgattcccgctgccagtcccagagccctgacacccctgtgtgaacctgtccctggctttttccctctcccgccggccagacagaacaggttccagaaaaacacaaggaccacctctgccatcataagaagggtccgagtattccgaagcaccggctccaatgggccccagagcagcaccccgaacaccgtcacagccaggacagccagccctgccgcccctatgatgattgcaagtatcttatcgtttttaccagtttccatgcaacaaatccttatccctgcatttttctttctgattcgtaccaatttcccagtcccggaaaccgctactcatactctccgtaagccttcttataaaagcccatgataatgtccgccaccggctccggccagaaacggcagaacatttcccgctcctccgcaaaccggcggttatccctgatacatgcctttgtggtggcatcctcatggacccggtaatagagaagaggccgctcatcgcagataaaacgtcccggttcctctgccagcctcacaagattgtcccagtccagggcaaaactgtactctgagcgtacaaagggttcacccagcaccgccttgtgataggtggtggccggacagcatatggggttgcccaggacaaaggccagcttctttacccaggccctgtcgttcatctgcggaaaccgcaggggcgtcctcagaatccgcttaatccagagcatggcatcaccggtgatgagcgctccctgtttcacaatcacatagtccgttgtaaaaacagtcatatccggatatctcctatgggctgccagaagtctcgcgctgtaatcacggtggtacatgtcatcctggtgcgcaatggtaaccagctcgccctccgccatggaatatgcaaaattccagtcatcctttatgccgctctccccctgccgtacacagacctgcaggccgtatttccaggccagccggtcaatatagctgctgggagtggacgtgcagataatgatatgggacgggacggtctgggccttaagagagcggatgcactgctccagataaggcgagtccttataggcgcatacggcaaatacatgcttatacctcataaaaatgttcctccagcatcaggcacagggtatgatagatgggaaggtgcagctcctggattttaaatgtctcatcagaaggcaccacgatggagcagtcgcaggctcccgccatcttccccccgtttttgccggtaaggccaatggttttaatgccggacgcctttgccacggcaacggcatacatcacattctcagcattgcccgaggtggaaatacccataaatacatctcccttttttccatagccgtacagctgctgcgcataaatcatttcaccgtttacatcatttaagaacgcggtggccagtcccgcgtgaccggtaagggcaattgcgggaaggcctccctgtaggcaggatgccagctcttccccccgcttttcgtctgctttctgaagcgcagccgcgaattcattggacaccgggcggcgttttacaaatcccttcatcagctcacccacaatgtgctcgctgtccgcgcagcttccgccatttcccgctatcatcaacttgccgccgcctgcgtaacaatcccgcaggatttcatatgcggccagcacatcgccctttactgcctccagaaccggataccggctggtcagttcctccagatactccatctctttcatcttacgtccgcctgtcctttctcaataatccactgagctgcctttacgagatcctccgcgtaaaaatcatataccggaggtatcccttccttctcctcctggctgcgaatcccgcttccataaccggttcccaccaaaatggtggtgaggccgtagttattcccggcctccacatccagcagtttatctcctatcataaaggaatgagccttatccacttcaaaccgctgtgcggcctcctcaaacatgccggtacccggcttgcggcagctgcactccttcttatatgggccgattccgtgctccggatgatggggacagtaataaaatgcgtcaatggacgcccccatgcactccaggatatggttcatataaacatgaaggttcttcacgtcctcctccccataatatcccctggccactcctgcctgattggtaaccaccaccagacggtaccctgcctcctttaacatccgcagcgcttccggcactccaggaaggagcttaaggtccgaagacctgtgcagatagtgcacttcctcattcagagtcccatcccggtccaaaaaaacaactcgatccattgcacatccatcctgtatgttatattccttgtgtgaatcctgtccggtaatttaacattaaatgttaaaccggtactcgccattaggcatatggaccttcacctgatcatactgccatctggactcgtctgccacccagctctgggcgccccgcagttcaaaattccaatccgccagctgtccgcctgcctgctccatacgggcagccaccttgtggcgcacattgtatggacagtacatgagtaagtacccgcctccgcctgctcccagaagtttgcctcccagggcgcctgccttcagggcctcatcatataattggtcaatctggggatttgttatcttgctgctcatgcgcttcttgctctgccagccatagtccagaagcttgccgaaactgtggagatttccctttaacagctcatccttcagggcataggccagggcctttacctcacacatggcctcaaaggcgtcctttttctcatagttttgcacctggtccttgataatattggcagagacatggatttttccggtataacagagaaggagattatactggagctcatgtatgatgtcctttttaatgcgcagagggttaaccaccacattgttgcgtccgtggaactcaataaaattgaatcctccaaaggtagccgcatactggtcctggtacccgccgtcaatctttaaatccaggcgctccacctgataagccaggtcagccagggcataggcatccatcatcactcccttccagcgggccatggcagtgagcatagccaccataaccgtggacgaagtcccaaggccggatccgggaggcgcatcgcactggagatacacttcacagccctggtcaatacccatggcattaagagccgctgttaccaaatccagttttccgtcatacacataattttccctggtattatatttcactgtcatatcaaagtccagggaatgaaccacaatctggtcgtcctccctgggcacaatggaacagtaggcatatttattgatggtgcttccgatgatggcccctccctgctcctcgcagaatggtgccacatccgtaccgccgcctccaaagctgacccttaaaggcgcccttcctctgattaccatatgtgtctcctctctctgtctttcgtttaggttgtcaaatgaccactttattcctcacatcctcctgaaactggaaatacgcctccggaatgccaatgtcaataaaatatccgtcattgacaaagcctcccaggcgccttccctctgacagccacttagggatcatgtcattttccagcgacacctttccctcgggtatctcatccagcagctgctgtttcataaggtaaatgcctccgttgattgtcccttcccttgcatcctctgtcttttcattaaacccggtcaggaatccgtcacggtccaaaattgcctgtccgtaccgcgaaacatcaggcaccctgcgcagtaccagagccatatccagattctggctgtcctgctgtctcaggagccgggtataatcaatctggtaaaatgtatccgcgttcagcacataaaaacgatcctctgtaataaacctgcctgcattcttaatggccccggccgttcccagaagcgtctcctcataagcatacccggcatggaacccgaaagccgccccatcgccgaaatgctcctccaccatagttcccttatatcccacggcaaagacaatatccgtaatcccgtggcggaccagctcacgggtcacatattccataaaaggcttcccttcaatcaacgccattggcttgggccggtcgctcaccacactgcgaagcctggtccccagaccgccggccaacaaaatagcctgcattcaacattccctcctgtactgtgggccttaaacgcggctgcattatccagacatgccggctgtgcagcccacgcagccctgaagaatcaacgaaagtctccctctaccaccttccaggccccgtccagactgtagtgtttcttaatataatcctgggtcctgcggcaaagctggtttaaacgttcattgtcctgatataatttaacggtcttgccggcaaacagctctgcctggtcctctatttccagcacggtgtccgcaaagggaatcccctctgcccctgtggatgtggtcacaatgggcgctccgttgtatatagcttccactaccttacccttcacgccggctccgtatctgagcggcaccaccaccaccctgcaatggccataaagctgcgccagctcctcctcgcttacaaaacctttgataatgattccattgcccggctcctccagggccttgatttcatctgtcaccctggatcctgccacataaaatttcacatccggcagttccctgcgtataagcgggaatatttctctggcaaaccacagcactgcatccgcattgggcggatgggcgaaaccgcctacaaacagcagtccttccctctctgcaaagtcatcctgtatgttatccagaaaggtgtcatagacatacgccgtaatggcctttgcgggaatgcttccgtcaatggcgtgtatggcattgatttccacataggaaggataataggaaacagctgccttgtgcatcatggtcagctccacggatttccagtaatccgcctccctcttgatgttgatatccccggtcagctcatattcccttcccagacgcagaaagtgcaggtcgtgtccatagtaaatcaccttcatattggtgtaatcttttataaaatccacatatttggtggcaatatggggacggttcaggtacgcaaatgatatctcgtctccatttgtctttaaccagtcccatatgcctgctgcgtatgtgtctccgtagagtacctcaattcccatttgcagaagggtggtggtatagggctcctcatgaaggaaattatctcccaggaactttaccacatagccctttttcagaaacatcttcaggtactggtaggttgtcttggatcccgcgtccctgtcaaaggtgggcacatagtggtccaccaccaggatgattttctttccctggctgcgctccctggccctgaacggattgggatttccggtgttgacgcactgccttttgaattcctcagcccatttctccttcagcttttcactgttttccacctggtagcgtttcaggccggttccgtttacatctgtaccgttggaaacgccctcaaagtggattaccttggagagaggctggtatacaaccctgtatccggcctttctcacctcaaaagccaggtccgaatcctcgcagtaagccggggcaaaccgctggtcaaatccgccgatctgcttccacagggccgtgctcagaaggatggctgcccctgatatatagtctacatcctttacataattatattccgccttgtccggatcatccagacggccgtagttccagccggaaccatcgctccagataatgcctcctgcttcctgcaggcgtccgtccgggtacaccagcttggaacccaccatgccaatggtggaatcggactcaatcaggttcaccagggaagagagccagccctctgtcaccttggtgtcattgttgaggaacatgatgtattttcccctggcagcctttgccgcctggttgcagttgcgcaggaacccctgatttgtctcatttctgcagattacaagaccctctgcataccggctcagctctgccgttgcatcggtggacacatcatcggcaatgatgacctcgtaggtgacatcctttgtaaactccaggatggactggagacatgcataggtatagtggacctgattataacagggaatcacgatggaaaccattgggccgtcccacgtttcgccgctgccggagtccatatatcctcccttgcccggtacactggggaataccagcctgccgtatttgagataatcctcgccaatcttaaaatcgccttctatctggttgcgtccctctttggtggcatacagccttccgtaacgcaccgggtgcttcactgtgttaaaacagtagttgagtatcttgcgcttgcgggttccccttggaaatgctttgttgacctgggctcccagcttgcgccgggccttgaacacaagggcttcatgcccgttgagataggttgccagcttgcccagctcgtcgatttcatggcgcaggtccttaatcatcacttccagatttgccacatggttattggtcaggcgctgcacctcctgctctttgcggatctgcaggttcttttcctccacctctgcctgaagctggctgatgcggtcctttgcctgggagagagcctggtccgtctccttaagctcagacagggtcgtgaccttctgctggtaattcaccaggtatccctggacagcgtccccgtggacataggactggaaggcgtcctccatggatgcgtacacagacgccatctcgcttcctatgccaaactcctgtaaaaattcttccagaccggcatatgacatcaatccctggtatttataataaaaataagccagattgcggtactgtacaaagcgggcaggaaccgggaaatcaaagacccattcatagtccaggcagtatagtttctcatccccgtccttttctgtaatcatcagattctcaaagagcccgtcaatgttgcttactttataagaaacatcatctatatccggaaccggcccaaaggtccgggtaaactccggcgtcacggcaaagggaacaatctgatcctccgccacatcgtaaagaaactgaagcgccgccttaatttcctccacaggcgcccttccgtcccggatgcaccggcccagacgttctgccagggtaatgccttccaggaaaacaaactccaccttgctgccgtctgcggatatctccggctccaggattctgactctggggttgagctgccttaactgccggcatttatttttcagggaaaggatgtggtatcttcctgcgctttcaagggcagccttctccacccggcgctctccgtccagatcccccatggtggtgcggatgcggaattcctcttttctggtacggttatacttggcgaaaatggttttctcctgccggccgtccttagatgcaataatcaggaaggaattggcaaaccggccaaagtcattttcctcaatcagacggtcatatacctccccttcattgaggcaggcataccgcggaccgtcataggacacagacgggctggtgatgtctccctttcccggcagataccggtctgagtagagtgatatgggcattctgtggtcgggcaccggataatagaagtccgcccgggcaagtcctgcttcccggcaggcttcctccgcctgttttctggtacagaagccttcctcatggtctgcccctgccaggtacctgagccccaatgcattttcacacgcaatgaccagacggccttcctgtttcagaaaggaggcgccaaaggcagctgcgtcctgtatttcctggccttttctgagtccggccatgaccacaaggtcaaatgacggctccggctgtcctgtctcatcccctgccttatagccatatgtgatattggtgtaagtcttgttgcgctcctgatttacagccaggttttcatctgcttcgtccatcactgccacatgggcgcacctggaggccagcagtcctgtcagaacgccatagcctgaaccaatctgaagcacttccccgcagccagtataatccagccactccagaagattctcccttatatcagacagggcgtggagcacctccggcccggactggctgtccagggccttcctgatgccctcaggactgcttccgtattgtctgaataaatctaatatttcataactgatgtccttcatggaaagttataatcctccgttcacagttgggcccgcattaccggcctctatcttcccggcctctatcttcgcagcctttacctgggactccatatcatacaccccaaccgtatttttattggaaataaccgtaatattggtcacgttgtacaggcggtggtacaccacatgctctccctgctcaaaaccggtgcagctcatgctcagcagatactccccgccctggagtgtcattttctgggtgaattccaccacatactcatccccgcgcttcacaggctggatttcggcgccttcaaacatggtgttggtgccggtaagctccgtaccctttttatcctttatagtataggtaaaaataggggactgtatctctgtattaaaatgaatccgttcttgtatggtaaacatctcaccttttaacagaaggttggtgatatttcccctctcgtcaaaaagacccaggtccacaatctcggcccggccgtccccgtattctgtacggtcataattaatggtcagctggtctttcatgagacggcttccctctaatcccatcccgccggaaaaatcagacatttccacaccgccggattttgttcctgccccagcccggctcccggcagtttccgtttcttctgttcctgctccggttagtaccccgctgcccgcatcttcctgcctgatttcccctgtcagactctccttctgctgtctttcccgctctaattccgcctttaaggcgtccagctgtccggccaggatcttcttatacatatccaccacccggccggcagggccttctgcgatgaattcccccttgttcagcagcaccacccggtcacagtatttgataatgcttcccatatcatgggtcaccataaggatggttgtccccttctggcggatttcctccatcctgcggtagcattttgactggaagaacacatcgccgacggaaagggcctcgtccacaatgaggatttccgggtccacattgatggccaacgcaaaagccagccgtacaaacataccgctggaataagtctttaccggctggtacacgaaatccccgatttccgcaaattccaggatatcctgaagcttggcgtccatctcctttttcgtatagcccatcatggtgccgttcatatatatattttcaatccctgtataatccatgttgaatccggcacccagctctaacagagccgatatcttgccgtccacctttacctccccggtggtaggggtaaggaccccggtaatgatttttaatatggtggatttgccggaaccgttggtgccgatgattcccaccgtctctccctttcttaccctgaaggacagctggttcagcgcgtaaaaatcccggtggtaattcttatgggaaatactcatggattccttcagacggtcaatgggtttctcatataatctatataccttggtcacttctgcaacgtctatggcatatttattgtcctgttctttcactgacataacattctccatctctatgcatacttctccactttaggcataagtatagcatagaatgcaggatttttatacctcaaacaatatttttcaaaaaaagttaagaatccccttgacatatataactgtatatattatagttacagtatgaactgtacgagttttgattacagaataggaggaaacacatgaaaggtacgatttttacagctgtccttatatgcagcgccatcttagctgcctgcagccccgccgcccccagggaagccatggcctcaacacagagtccgtccccgtctcctgcagaagaaccggctgatgagacatctgatgaggcatatcataaaatcactgccgaggaggcaaagcagatgatggacgagggcaatgccacggtagtggatgtgcgcacggcggaagaatatgcggccggacatattcccggctccattctgataccggtggagtccataggtgatacgaagcccgtagaacttcctgacacggaagcagtgcttttggtccactgccgcaccggtatccgcagcaaacgcgcttcggaccagctggtggaattgggctacaaacatgtatatgattttggcggaattgtggactggccctatgaaacagtaacagaaaactgatttatattagaacagcttaatattgcaagcttatatataagattaaagaatgaatgttcggtgacttttatcacataacacaagtacaaaatgtggtatcctataatcaatagagcaaaacacaaaaaagagaaaacctggaggtaataactatggaattgaaacatttaaataaggatgaatttgagcaggctgtaaacgccggtgacgagctggtggttgtggatttctttgcaacatggtgcggtccctgtaagatgctgggtcctgtcatagaacgggcggcagacaaattttcagatgtacatttttataaagtagatattgatgaggagatggacctggcggcccgtttccaggtaatgagtgttcccacccttatctacttcaagcgcggcgaggtgttatccaagtcagtgggtctggtttcaccagctgatgttgataaggaaatcagcaagttaaaataataagccatcacacatttttgcattccctttttggcaggccggttcccgagatggacccggcctgtgttttatcccttatccctgtttctttaacttcccattgagcttggcataaatccgctggcgtatccacggctcagaggatgccttaagcgagtcctccaggccgaaccaggctgccccgctgttttcatctgcctttgaaaacagggcatcgttctcgtctgcctccagaagataggtaacattcagatgcaggtgggaacccacataggccccccgcttctcatgtccgtccacggtcaggacttccagactgtagatatcctccgataccggccgtaccctggcaagcccgctttcctcctttacctccctcacagccacctgcagcaggtcctgctcattgtccgcgtgtccccccagccatgaccaggatttatatatattgtgatataccatcagtacctttgtccggccgggattcaccacccacgccgaggctgtcatgtgagccaggcagtttcccctgtcaaatatatcctcttcctccttcaggcatttcagaatcatctgacggtctgcctcctcctgttcattatatgggcagtagctctctatctgcttaatcaaatccgcgcggtccattttatatacttctcctttccctggcatacatgttccagctccttttgtatttttattacagtttcctgtgtgaccccggtcaccgaaacctttcctgttttatgatatctttgatacatcaaataattatgaggtgttttatcatgagtcatttatccaagaatcttgcccgtgtggatgccggtacctgcgtggcctgcggctgctgtcttaaggtatgtccccgccaggccctttccgtgtttaagggttcctacgcagtggtcaaccaggacgcctgtgtgggatgcggcctctgcgcaaaggaatgtccggccagcgtaatatccattcttccccgcagccatcaggaaatagaatctgcccagacaggaggaaaccgccatgaataagccagcccttaaagcgaaaaaacactggtacgattatctctggattacatccctgctgtacctgtttctggggtttttcaatatcatgtttgcatggctgggcctgatttgttttctggtgcccttagccatctccattgccaccggatccaagctctactgcaaccgctactgcggcaggggacagctgttttccattctcggcaaaaaactgcatctgtcgcccaaccgtgagatacccgggtggatgaaatccaaagcattccgctatggtttccttgtattctttttagtcatgttctgccagatgctctttaacacctacctggtgttcaggggtacatccggcttaaagcaggcagtcacagtgctgtggaccttccgcctgccctggcagcacgcctatcacggcaccggccttcccctgtggaccgcccagtttgcctttggcttctacagcgtcatgctgacctccaccattttaggtttggccaccatggtcctgttccgcccccgctcctggtgcgtctactgccccatgggtactatgacccagatgatatgcaaggcaaaggcgggagcttgccctggtgcggcatccggatgcgggacctccggctgcagttctttgggctgcggttcttccggctgcagttcttcgggctgcggtgcttccggctgcagctcctccggctgcagttcttccgattgcagctcctcctgctcaaacgaatctctttcatgactttgcagacagtccgttcccataccgcggcccctttatacctctcatcctttgacaaaatacaggaaattgtctacactataagaatatataattacaccctgtatttaaactcccaactataaggaggagccgtccgccatgaaccatagccgcccgaacatcacagatactctgaaaaaatgctaccccttctgggaaaaactcaccgatacccagagggagcagcttaaaaccagctcctatatcagggattatgaaccaggaagctttgtccacagccgttctgaggaatgcctgggcattctgatcgtattatccggccagctgcgcacctatatacagtctgaggagggccgggaggtcaccctgttccgcctgggtccgggtgaggtgtgcaccctatcggctgcctgcatgatgcaggaaatcacctttgatatcttcatcgagtccaccgctgcttccacccttctcatcaccggcgcctccggcatccaccgtctcatggaggcaaatatatatgcggaaaactacatttaccgccagactgcggaacgtttctccgacgtcatgtggtccatggggcagcttctcttctccagcttcgacaaacgtctggccgcttacctggcagatgaatatgtcaagctgggctccggtgtgatctccactacccatgaacagatagccaagaacctgggcactgccagggaggtggtgtcccgcatgctcaaatattttgaaaaagagggcctggttgcccttggccgcggaaccattaccataaaaaatgtctccggcctaaaaaaactgctgtattgaaatagtcttcagagcctgtctgccccgttcccctctttgcacagctccatcagtgtccttgcgctgcggggcagaaacttattcttgtggtaaatcacagaatacttccggttcagagccaggtcctttatccggaattcagcaagttccccttcctggatatcctggcgcaccagaaaatagggcagaatggaaatacccagccctgcctttaccccctgcaggatgacctgattgctggcgctctgccatatagggcggacattcagctcctgcgcggccagtataccgtcaaatatctcccttccagcgcttcccttttcccgtaaaataaaatcctgattccgtacctccgacagctcctccagagtttttccggcaaattcatggccggccggacatatgaataccagccggtcccctgcgaagctctcgctgaggataaagggactgtgggctaccccctctatgattcccacatctatatcattgtcaagtatctgctgttcaatggttcctgaattggcaatggatgcctccaccttcagggccggatactgctgtttcagcttcttgatataaccgggcagcagataggtccctatggtaatgctggtgcccaccttaagccgccccatggcgtccacgtcccggaccccctgctccatctcatccagcagatctatgatatgcctggcatactggagggccctgcggccgttctctgtcagatacagcttgcgggatatgcggtcaaacagctttaccccgtagtagtcttccatttctgagatggccaggctgatggacggctgggcgatgaacagctgggaagcggcggccgtcatgctccctgtctcacatacggtaacaaatatcttcagatggcgaaatgtcatgttcctcttttcctgaaccgcgcatggcagactgagggtacatccctgcaatctgacatagggcacatatataatacatctattataattattatttaattatagtattttacatatggatttgcaagctgtatagtaatagcagaaaaaacaaatacatgatgatagttacatgtattactgttaaaagggggataccgtcatggtagttaacataaaatcaaaaaagcatgcttcctccagggttccgggacacgcgggcagccgcggctcccttctggcaaaactctttctctcaaccctgtatctgagcgcttttaccttcggtggcggatatgtcatcgtcacactgatgaagaagaaatttgtagacgaataccactggattgatgaacaggagatgttggatctggtggccattgcccagtcctcgccgggcgccatcgctgtcaacggggctatcgtggtaggctataaactggccggcatggcaggggtactgaccgcggtcattgccactgtcctcccgccgtttaccatcctgactctgatctccttctgctacgccgccttccgctccaacctttttgtgggatggatgttaaacggaatgcaggccggcgtgggggctgttattgcccaggtggtctgggagatgggcagcggcatcgtaaaagacagacagtggatatccgtcctgattatggccgcggcctttattgccaattatgtatacaatgtcaacgtagtcctgatcatccttttgtgcgccgccataggcgttgtgcggaccctctcctccgggcataataaaaaagggacggaaggaggcgcgctatgatttacttccagctatttttaagctttcttcagattggcgcattcagtttcggaggcggatatgccgccatgcctctgatccagaaccaggtggtcacccttcacggctggctgaacctggctgagtttacagaccttgtgaccatttcccagatgacccctggtcccattgccatcaatgccgccaccttcgtgggcacccgcattgcaggtacgcccggggccctggcggcgaccattgggtgcgtgctgccgtcctgcatcctggttacccttcttgcaaagatctatctcaaatacaggaatttaagcctgatccagggtgtcctcaaatccctgcggcctgccgtggtagccatgattggtgcagcgggcgtcagcatactggtcactgccttctggggactggcgggctttacccctgacctgggagccataaacctgcgttccgtatgtattttcaccggcgccatgatactgctcatacgttttaagatgaatcccatcctggtcatggtgctgtcaggactggctgagacagcctgccagctggccatgcgcgtgatatagcatctgcttatcattgactttaaagaggttccgatatagaatcgaatgggtacatcaaacaaaacacccggaggattctatgttagcggaatgtattgcacttggattatttctggcaggtctcggactctgcattgttacgggcatacagattctgtatgccctgttgttcggcctgctctgtttttccatctactgtctggccaaaggatattcggcaagggaaaccggctccatgctgtgggagggtatttcccaggtacggaatatccttattatttttgtatttatcggaggtctgaccgctgtgtggcgaatcagcggcaccatcccctatatcctttattatgcggtaggattcatacatcccaggtatttcgtgctctgcaccttcctcctgtgttcttccatgtccttcctcaccggtacctcctttggcacggcaagtaccatgggggtcatatgcatgctcatatcgaatgcagcaggcttaagcccctttcttacaggcggcgccatcctctccggaagctttttcggggaccgctgctcccccatgtcctccagcgcccagctgatatgcagcctgacccggacagacatctatcagaacataaagcttatgtgccgcagcagcgcagtccccttagccgtaacatgcatcctctatgtggtcctggcttccggttccagcgctccggcggacagggagctcctggacctgttcaggacaaatttctccctccactgggccgccatgcttccggctgtcctgattctggttctgtccctgttgcgcgtggatgtaaaatatgccatggccgccagcattgcagccggtgccgcagtggccctgtttgtccagggaacctcccccctggccctgctgcgctgcttcctaagcggatatgaggcccaggacgggacgcgactggcccagctgttgaacggaggcggcatacgctccatggtaaaggtgggcatcatcgtgcttatctccgcctcctactcaggaatcttttcacacacctgcctgctgtccggggtaaagcatgcccttttgaggtctgcccggcgccttactccctttggcactgttctggtgacctcggtcctctcctgtgcggtcagctgcaaccagagcctggccaccatccttacctgccagatgtgcgacgggctttaccccaaaaaggaaaagctggccctcgcgctggaggacacagctattctcattgcagccctgattccctggggtattgccggcactgtgccggtggccgccatcggcgctcccatgggatgcatgttttatgctttttacctgtatctggttcccctgtggaacctgattacggccctgtaccatgaccggatccgggccggacgcactgccctcacctcattcatgtaattccagcggcaggccgtcgggatcatgaaagaacgtcattctcctgcctgtaaactggtccatgcggacaggttctgtgtccactcccttttcattgagctccctcacggcagcatccatatcctccacccggaaagccaggtgtctcagtcccagggcttcagggtaacttggcctgggaggattatgcttccctgaaaacagctccagttcgcacccgtccagctccaggtccagcttatagtcatctttttccggcctgtaattttcccggatcactttaaatcccagaagctccacatagaatcttctggacacctcataatctgaaacaataatagccacatggtgtattttctttaaatccatttcatacttcctcctgcttgcgcctggttattccccggctgtccctgctgcgggccgcatgtactctgtttcgtcccttttccacagactgttctctttccacagtcagccaaatccctacaaaaagtcactgagataccagcgttttaagctcccctcctgaaacacatactccggcgtcttaaggggataggaaagttccgaggcataataccacggatcgtccatatgaaggggattgttaagaatgtggaaatcctgggcgggcatatatccctgggccagaagaaaacagatgtctccatccccgttcacagccacatccgccaccatgacgcagtgccccggacttcccccttttatgaacatgtcaccggcctttatccggcttatatcaatgaccgtacactcattgtccagggaaagggtgcctgcgtacatcatcacatacttcatgtagagcaggaatgtctcataggaatcatcataagaagccttcttaacccacgacacctggtttccgtccactgacaggcggttcccttctctccaggaggcataatccatcaaaaatccgttggtaaggtgaaatgcaatctcatcaccggccccatgggcccacaagtactctccgtacatacgcatgaggctgtccgcgcactgctgcaaatcactgtcaaatacaggcagagcaaataccgctgcatgggctgtctggtttcccttttcactgccgtcgtacagcatcaccgggctccggtccggcttaaggggataggacctgatataatcctggaagcttccctccccggcatctgttctctgaaatcctgacggtacgggaatacgctctgaaagaacggctcctgagggattcacggcaattcccgttccctccggctccggcgaagctgtctgcgtcaccctctgtacatcccttccctccagtccggccacagcctgcttctgttcctccgccgtctgttcatctgcctgccccggactgcatccccacaggaaagcggccagaaataccatacccgcagcccccctaatccatttaaccatatatttttctcctccctgtcacctgtccacaaccaccttgtcgctctttatggtctcccttttatccctgccgtcaggaacaaaccggaacaccacaaattccacatcctcctccgtctcattggcaaaggtgtgaaccgagcttcccacacggacaatctcctgctcacggaccttcctcgtcctctccgccccatcctccagccagcggcaggtcagcaccccctttgttatgagaaggcactcatctatacgggtatgataatgccattcctgaacactccccggtgtaatccggttcaggtgaatttcggattcctcaaagatatggtagctcacatgggttccattgggcttctgtacggttatggcatcctccatgccagaaaaactgattggtctcatatgccgggccctccttttactcaacagtttacagccttccggcacatgcgtcaatcctttgtgcgctccctgtttaagagcacgctgtactcatgctcccaacaatggtataatgagcttaccgcaacacaaaaaaatgaaagaacaggggaattaatcatggaaatcattcaggtaaaaaaggacaaaaagaagtatctggacctgctcctgctggcagacgaacaggaggatatggtggaccgctacctggagcggggcgatatgtttgtgctgacagacggcacagtccgggcggaatgcgtggtgacaaaagaaggtcccggcatatatgagcttaaaaatatagcgacagccccccagttccatagacagggatacggccgccgcctgattgaatatgtttttacctattatccggatttaaggaccctttatgtgggaaccggggacagccctctctccctgggcttttaccatgcctgcggttttatagattcccaccgggtggagcgcttttttaccgacaattacgaccatcccatcattgaggacggaatccagctggtggacatggtctatctgaaacgggaacgggacatggcataactgccgcaaaaggagcgggaccaggccgttttgcctcccggctaaacctggcttccaaactccttcagccactttctccgggccttgtaatccggcaggatccgctccacctcagcccagaaccgttgggaatggttcatctcttttctgtgggccagctcatgaaccaccacataatccagtatttccggcggcatgagcaccagcttccagtggaagttcagattcccctgggcgctgcagctgccccaacgggtcttggcagcccgcacggcaatgcggttgtaatccactgccatgcgctttgcgaaataggcgcaccggttctccagctgcatcttagccttctttcggtaaagcttctccagctcaggggccttctcatagtctttgaccggcctggactgctcctgcctgcgccgctccatgatcataaaccatttctgcacaatccattcctggcgctcctttataaagtccatcacgtactggtttggaatgcgctccggcactctggcatacacatggccgtctgccttgatttccagccctatggtacgccgtctggagtagaccacctctacgggaatgacaccctcctgttccctatggcgccagctaatctccaccttctgtatcatgtaacgctccttgttatcctacagaacatcggaaaaatggggacggagacgcttgaacatcttaagtcccagcaaaagcaccaccgcggtaaagccccagtaataaagggtcagtgtgggccgttcccagaaccagtttcctgttagcatggtatctctgtacccggccaccacataataaaaaggattcagcttgaacagcacttccacccattttcccgctccggtaaacatggattcgtggtacatgatgggagtcatccagataccgaactggaggcagatactcacgatctgcgccatatccttaaagaacacattaaccgcgctggtaaaaaatccgattcccagggccagcagtgaggcagccagggaataatacaccagctggaaccatatgacagagggcatcctgcctataatcagatacatcccaaacatgatgaccacaaaaaaggcatggaccagcagacaggatataagcttgataatgggcagtatttccaccttgaacaccaccttcttcaccagataattatactcctggagacagttggtaatgctgttgacggattcactgaaaaagaaccatggcacaatgcccggcaccagccactccacataagtgaacccttcaatgggaggcggggatttaaagcccattccgaatacgaccgcatagatgctgactgtcacgataggctgtatgaacatccacaccaccccaaagtaagagcccacaaagcgtttccggaaatcagccttgcccaaatcccatataagcttccgttttcctataatctctttcatcagagaaagcacataattcatataagtaaattccttttcatcagaacttgaaggtatccctgaggccgctccactttctgtccttatccgatataatcagctgcatgtccggttctatgggccagtccaccccgatttcagggtcgctccacagcaggccgccctcgtctcccggatggtagaagtccgtgcacttataagcgaattccgcttcatcggacagcaccaggaatccatgggcaaatccttcgggtatataaaactgcttcttattctctgcggaaagaatgacgccaaaccattttccgtaggtttcggaatcagaacgcagatccaccgccacatcgtagacagtacctctcaccacccttaccagcttgccctggggatactgcttctggaaatgcagccctctcagtacgcccttgacggacatggactggttgtcctgtacgaacaccatgccgagacctgcttccttaaaatcattctgattgtaggtctccataaaatagcctctctcatccttaaaaactgcaggttcaatcacatacagccccttgatgtcgcagggggtcactttaatctttcccataaatccattcgctccttttttattgtcaaacacgcctgaccggcccgcagccgtttgacagacgttatccacatccatctggcaattctatcactttatccactgactggcaagtccttatgcacttgcggaccgcaatttgggacagctttgtcacaccctcaggcataccaggctgaacaggcgcagcaccacgtagatatccatggcggccatggcaaacagcagtcccctgtcatcccagtccgtccgcaccaccttgtcatttttaaggctgagaaggaacatggggagcagcggaagcagatatcttccctgtacaccgtttatgacattggagctcaccggcgtccaggccagcagcatggagaacatcagcgctcccaggcataccaggcagagaaaccatatccacagacggcccttccattggataaaaatgctctctcctggttttctgagcgccagcatcaccaatatggctgtcagacccagtatgaccgcataaggggtgttgagcactgcatccatattccccagcgctcctccaatcataccggagtagagctgttccccctgccaggccagggtattgtaacacatcttaagcaccagcaagggactgtgaagcagctgtccgaaggtgtagcctgtttccccggcccaggctacatatccctggtcagcctgggtgtacagcgacaccgtcctgtggtttaccactgccatggccgcggcaaatgctcccagtacggaagcagccgacaggctccattttccccagcctccgaacttcctcaccggtatcaggagacagaaaccggctatgacgccgtacaccattttgcagggccccatgacagccattacaagggccagtacagccacatccctaacctccacgcgctcagctttataggccaaatcaaggcataccgctgaaaagtatccgctgagggctataatcatcacatcataagaaaaggaggccgccagatggagggtcatgggaagcagggccgctcctgctgccacctccttgccaaagggcatccttcgtatggtgagacatcccatggcagtaaaaaacataaggttgaacaggcgtcccataaataacaggcccagaccgcccagtcccagcatccttgccagggcaatgcccatggcctggggaacataggccaggggcgtggtccgtaccggcatctggtatgacatgactgtgccctcctcaccagtgccgccaaggcccctctcctttatggtcctgtatgtgccctcctccagcttctgtcccagtacaaccgctgtttttccgccgttttccacagcttcataatccataactcccgtcaggtcctcgatgaatacatcctgggcccttatgaatacccgctcgtcctccgcccgggccgtcctgcccatcaggcggcttgaaagctggtaggcgctgatataatggctcacctcgtccggtgctgacaggggaggaaggaccaccatatacatcaggccgattcccatggctgctgcgggaaatatccgcgccaggccatagtcccgccttaccaggaacaaatatcccactgccgccagtaccagaaccgcaaagaccatcagcccgccgtaccatccgtagaggaagcggtcccctgtttcaaggacaccggccctgacatccgtcatatgccacagtccaagggcaagaacgctgaaagagcctatcagccagacacagcgggaatgtccgctcagcatcctccccgacccggcatcgtgcctgattcccggtctgccgctctcctgtttcctccccgctttcttacctgccatctgtttcctccccggccattttctttgtactcatgacctccctgctgtcctttccggctgactcctccttttccaggaaccgctgtatcttaagctccagttcctccctgtccttctggtccagtgcaatgcgctgcaccagctccttttgcctgctttccatctgggacatctggagtgtcattccaaatacctttacaatcagcagaaaaatcatgaacaggaagagaaaattaggcgtggaataaattcccagcaagtgggcgcaggcatccgccacagccggaaacagtgagaacaccaccagaatcagggccatgataacccagaacagcgccgcctcaatctgtaccttagcctgccgaatcttccgcatcataaaagccatagtcaatatagagactataaccagaatcactctgaatatcactgtcatcataggatgaatcccctgccttcttttgttatttccaatactccttattcatactgcacgctgccgccagcttcacaggaaggaaacggtaacacctgcccagacggtagccagcgtatttgaatccgctctttacaatcagtccgggcaccagccatgggcggcggtgggtcacaaggtaacgggctgtctgtctgaccagacgtattccctcgccctccgagtgaatgcctgcgaacacctccggatggtctgcctgggatacggccaggtcgaaattgcgatggaactgggccgcgcacccataattgtgggaatgaatgactctggcctccgccacatacgcgatggcataatcgtcctggagcactgccttccccgcaaatatcatatcctcgttgaatatggtcttttgaataaaaccaccctggaaccagaacttctccctgtcataggcacagcatacattggaggcaaaaaaggtcttgatgcccattcttcccaggtcctccttggtctttatacagctgtcctccggataattaaaggaacgggtaaatcgctctgccatggcgcagtccttatccggcagctgcctggcataggccatgatgaccgactcaccgccgggccccctcttgtcaaaggcagccgccagatgctcaatcagtctttcatcggccggaaccgcgtcgtctgtcatgaataccatgatatccgccctgctgcagcgcgcccccctgtttctggtggctccatggtcaaattcctccttggacagatgatgcacttccagattgccgataccctcaaagcccttatcattccagtaggccttctctgtattcatgacaatgattttgcctatgggataggtctgcatggaaagcatctttaaaagcctggagaacttttttccgggcttgtaggtgggtatgattacatccacccgcagcacgcgctttctctcccggccatccgctatctcagtattacgtgttacttcctccattaccggcattctcctttttctcactctgataggcgcccgccgtatacaggccgaaacctatcactaatcctatcataagcagcagatagcagcctgccgccccattgattccaaattttgataccagaaagccggataataccgcagccgctgccgcggctgccagatacacggtaaatatggccttctgcctgcgcatgatcacaagggcatagtacatcaggttggccagggcatagaaccctcctcccagaactatgatgatgaaagccccgtaatagctgaccagccttccttcatagccgctcccaagaatcatctccatcacggacagcacccattttcccaaaacagcagtggcccccactgccagtaccgttagtcccaggataatggcgccgatgcgcatgagctccttcttaaagcagtcatagtcccttccggtccacaagtctgtaagcctggtcagaaagggcctgattacaaaattagctaccatataaataacagaggtaggcataaaaatcaagttaaagtatcccgacgcagcgtcattcatcctggcgtcaatggcatacttggcagctgagaacacataaaagtccagaaaagccgatataaacaggaataaggtacttttaaacagccttcccgtctttctttcccccttgttccagtccaccgacggaagggcatggataacatccaggttaaacaaagcgattccggctgcctgggcagccaccgcggccagacaggagaacaaaaggtgttcaaacgccgccagcgtcaccagaaatacgctgactgaaaaaagagtacggaaaaagttggattttcccgtaagatacaggcttccctggcgttggaactccgactcatatacatcagcatacccatctattaccttgtatatgacaagcagaatgagaatcatgcatttgtccgccgggtaacgccccacaccgtgcataaaggtgaggaacacagcccctgccgccagggccataatacatgttatgttcctgtgctccagataatccccgaaggaatactcacctgttccgtccgtaatctggaagggacggataccaaaataagctacaatgaacatctgctgtcccagagtggaaaatccgaaggaaaagatgcctccctgtccgtctcccaccacccgtatgaccagaaaagacagaaccatgctggccaatgcatagacaaaactccctgcaatattccagaccacgttctgccgcccgatatccgttcctttatataataaatgtttcgtcagattcttcatatattctccaagctccggaagatagccggaaagcaattttcaaacgcccctagcgtttcctgaaattctgaatcataagaatggaaatcagcatcctggccatatagtggacggctgtcagcggtttcaaatagctctccccctccgtcctttcgtcaatggtcacctgcagctccgctaccctggcaccctgtttgatcagaaaagaaactgtatccggctccggtccgtaattcaggttaagggcaaattcctctatcatcttccggttgaacatgcgcatgcccgaggttggatccgtcaccctggtgccggtggtaagccggatggcgctgcctatgactctgctcccaatcatcctggccgaccatccctttttctccgtcacgaaccgggagccgatgacaatgtcatacccttcctccatcttctgtctcatggcctcaatgtactccggcctgtgctgtccgtctccgtcaaactggatggcgtagcggtaccccttcctgtaggcgtatttcataccggcctggaagcatccggccaatcccagattcaccggcaggtccagaaggttatatcccttttccctgcagattttggcggtgcagtccctggaaccgtcgttcaccaccacataatccagctggggaaaacccctgaccaggtcctccaccaccctctctatgttcttttcctcattaaaagccggtatcaccagcagtaccttatccatgttcgtctcctacatccccctgatgatgccgcagatacggtccacatcctccagctccagatctgcatagcacggaagcgtcagcacacggtcagccacataggctgccaccggcgtatccttggaggaaaatctgcccttgtaacactggaaatcattaatcaggggataaaaatattttctcgggtatattctgtgccctgccaggcagtcatatacctgatcccggtcagctttaaagtcctcaaacagcacagggaagtaggcataattgggcgtaagcccttccctgaaggaaggcagcctgatacccggcacgcctgccaggccggacagataacgttccaccaccagcctgcgcctgtctatctcctggtccagatgatgcagattgcacagtcccatggctgcctggaattcattcatcttggcattcccgcctacccataccacatgctcctggtccacaatcccaaaattcttaagacaattcagacggtgctccatccagtcctcccggaaggtaaccgctcccccttcaatggagttaaacaccttggtggcatgaaagctgaaaatactggcgtctccgaactcggccacgctttttcccttataccgctccccaaaggtatgggccgcatcgtatatcacccgcagcccgtgtttcctggctatggcctcaatccgctccacatcacacaggttcccatacacatggaccggcataatggccgaggtcttttccgtaatcagggcctcgatcttttccgggtccatggtgtaatcctcgggacggatgtcgcagaataccggagtcaggttattgcgcacaatcgcatgggtggtggacgcaaagctgaagggggtggtaatcacctcgcccgtcagctccagggcctggatggccatttccagggccatgtgcccgtttacaaacagcaccatgttccggattcccatgtactccttaagctccttttccagctgtttgtggaaatcccccatattcgtcagccaggcgctgtcccatatgggttttatcatctctatatattcttcgtaagaaggaagggaggaccgggtgaccagtatctccttctctttatcttcctgtccgttcatacgtcattttgtcctttctgcaggcctccctgtatctcaaagcctgcctccgcactccgctgcgcctctcactgcctgccttcacgcgccgccgcacatctctatgcccgatgccccgcgccgtcctaccaccgcatcctgcacaccacggtcagaaaccacacctctgccaggacgagtcccaatacagcccttgctgctgccatgcctgcggggccggttcccagatattccttatagtagtacagcttgctcctgtgaagcagcctctgcttatccacgatccgtttaaagcttttgtcaatgctgacagaatgggcatggacataggactcatccgtaaccagcacggtcttaagccccattttcctgaacttctgtcccagcaccttttcttcataatacaaaaagatgtgtttgtcaaatacttcttttatttcccccggcgtgagaatgcctgtctttaacataaaaaaggacccgggaaccgcatccaccaggcggcagtcctcatcccccgcatatgcgagcctgtaggaaggcgtattcagcatggccttaagcagccgcctggtaaccagtcctgtatccagcagatccttccacagaggaaggagggtccagtaagaaaacagttctccccccatcgggtccttcaccctggccgaggcagccaccgcgccctgtgtcttgtccagtgcatcctttacccgccggatgcagcggggggtcacatgaatgtccgggttggcaatgattacatagtctgcctccagacagcttacggcgtaattgattccctcctggtttcccataccgtagccgccgttttgctccagcctgagcgcgtggaccttgccgccgccattcagtgtctgcaggcgcttccatgaatcatcggatgagtgattgtccaccaccaccacggagtccagacattcataatccctaacctcatccaccaatgacagggtggtataagagtcattatagttcaatataatcatgcttatcttatccatatcatttcccgcttccaaaagccttctgcttcctgcggctgtccaccagcctcattcccagcctgcggctgatccacagccggaaggcagggcagataaggcttgcgtggttaaacacccaccacatgtgcatgtacagcctctttccctcctgctttggggttcccttccagggagtcttatccagataatactcatagagccttctgaaatggttgtggttcccggctatccagggcctctcgtctcccagataatggatgatgacaggggcctttcccgcctgccggtatccgtcctcccccactgcctggtatgccccgcacatggacaccagggtcctgtatctgaaataccggtagttggtaaaataattataccggaccggcagcgtcatgattctgcccctcagcgccccgtttatggtatcctggtcacaggcaaaaaggctgccctgatgaaccctgtaaaattccagcagctgccccagcacatcctggtttctccatgcctccaggtccataagcaggactccggaattatagtaaggctcatccttttccatgccgatggattccttcatctccctgtaaaccgttggctccatcaccatgccggccagatagtttccaagctccgtctcatacaggggacggatacttccgttcacaatggtatcgcagtccagatacagggcctttcttacgctgtccggcagcaccttgggggcaaagaggcgccccatggcgcttatatcaaatcccctggtatccacagcatagtcgaaccgctccctcaggtttcccagctcagccacatgaaggctgcggcagaattttcccgcaacaccggccagccgttcaaggtaagcctcactcattcccacggacaggatatatatgtccatccgggggatattcctgttgtggtctaacagggaataaagggaggctgccagatgtccggcatacccgtcattggaggcgtaaataatattaacagtttctgtattccaatccatattatggcacctgtttcttacattctctagtctttctaaggtcattttgtttacaattttacattatagcaggtaaaaagtaaatcacatctggaattttcctgccaaatatgatagattaagacatgtatggtaatctatataaaattcaggaggatgttacgaatgaataagttaatgaagcgtgctgccgcagcccttctgtccggacttctggtcttaggtcaggccggacccgcattggccgcgcaggatgattctaattatggtccggctttttccacaaaagtcgaacaaacctcccctggttctttagacggccagagtggagatggacagggctccggccctcaggcggtggctccggccaacgcagccccggcagaacaggccgatggcgccggcgcagcagccggcagcaccgaggcagccgctggtacagccggcacggacggcgtgacctccgctgccacggaccagaacgcggcacaggcagcagacgattctgcccaggccgatgccgaggcagccgccgcagcccagtttgcagcagaagaagcagccagacaggcatcagccaatacaccttttcttcagattcaggtgctccgtccggataccacatggactgaccctgtaataggcgatacaccggtggtgtctgaacagggattccgttccatgtccgtctatctgaacaacatcgtgggcgacatcctttacaggacgtataccagcgcacatggctggagcgactgggccatgaacggcggccacacaactgtctgggaggacggtgccctggtggaggccatccagatgcgtttcaacggctttgtgggcaacacatttgatatttactactgcactaccctgaacgacgggacagagttaaactgggcgcgcaacagcgcaacagcaggaaccatgggcacaggaaaggtgctgagcagcttcagggtctctctctggggcaaaggtgtggaaggcgcttcctacaacatggagaaaccattggaagcagcgttcccggatggaatccaggttgtggacggggcagtggcgtacagcagcggcaacggcgttccatttaccggatgggcctggaatgacagggaccgctactactttgtaaacaatgcgcctgtaacaggctggcagtacatagacggtttcaagtattactttgacgaaaccggcaagctgctgaccgacttagagcccattgtgggcaacagcggcccgttcctcatcagcatcaacaagcagatgaactgtatgaccatttttgcacaggacggcgccaacggcttcatcatcccggtaaagacctatcttacctctaccggaccggatacacccattggaaccttccaaaccccggccaagtaccgttggcgtgacatgaaccacggaatcttcacccagtacgcgacgcgtatttacaagggtttcctgattcactccatcctgtacagccgtccggaccccatgacattagatccgctgacctataattatctgggtatcgcagagtcagccggctgtgtccgcctcctttccggagacgccaagtgggtatatgacaactgtgccctgggcacaacggtgaccatctacaactcaccaaagccaggcccttatgaccggccggctattgagtgggtcattccgggagaccagcactgggatcccacggatcctctctttgcccagcagcagtaatctttaaaccatgggtaatcattaaaaccaggctgtaacgcatacagcaaaaatggcggggaaccgttcactggaatcactttccagtgaacgtcttcctcgccatttcgtatactgccggcatggtgtgctcaaatctcaggaaaaaccgcatcctgggcgtaagctctttatagtacctgcggtactgtggattgaatatctcttcaaactgcttggtgtttaccattgtctggtaataagtcctgcgggcagcgctctctgccgcttccttaaacctgccccctgtggccctgtcaaactgctcataggtgcgcttcatacgatcacagtaagccctctgctttccctggtaatccccgttctttccctccacggtccaggagcctgccacgcccacccggtaggcgctcatggcctcatcaaaataatacccgtatccatttgccgccgcaatcagctggatgggcgtatcccccacaggacagtccacatagtaatccggcagctccctcaccagacgggccggaaatgccatggacgacatggcgtatcccgaaggcttgtcgatgatttcctccggcggcagtacgcggctctcccggtacggcctcatctgtccctctgtcagcgcccttcccaccaaatctattttggcgctgtggatgcacaaggtacagtcagggtgggcttccatgtaatccacctgcttctgaagcttatccggtgacaggaaatagtcgtccccgtcacacataaaaatgtactttcccctggccctggggaagttaaaggccccgctgatgttgtcaattccctgtgaatactggttttctgtctgaattaacggcttcacctggtccggatacctggccgcatattcccggataatgctgctggtcccgtccgtggatgcatcatcgtgaaccagtatctcaaatgcaaaatctgtcttctgcatcagaaagctgtccagggctgttctgatataatttgcatggttgaatgtaacacagttgatgctggccataatagctgtatctgcggtctgaggcccggttccgccttccactctgtctcccatatcctgtcacacctccctgtcactctaccttggtgatatattcttcgtatttcctggcaatatacatgctcttgatacggtcgtcccgctctatttccctgccctcaaagcagcgcagatggtttgtcacacagtcatatcccgccaggcaggaaaactccaccccgccggaaaacctggggttgcactccagcatgtggtaaacgccgtcccggtcctctataaattccatgtttacgcatcccctgactcccaacagcccggcaatggcacggcaccgttcttccagctgccggttcctgaacaccagcactgaggttcccgcgccgtttaaggtccgcaaaagctccctgcggcagacggctgcgcacgtgccctgctcaggacttcgtaccacgtccaccgtgaccacgtttccctttatcatgggctggacaatataacctgccggatcggtttcccccaggaacccctccatctcacggcgggagcccacaaacctaaggccctggctgctccttccgttgcagggcttgcacacagccgggtagctgatttcatccaaatccgcatcctccaggcgcacagtgggaatcacggttccctccatgtgctcctccagataacggtacagctccatcttgtcgcggcacaggccgatacatgccttgtccgacatacataaggcggcatttatttcgccgaattcgcggcggtgcaggttgaacacatcgatctccgcgtccgtcagcgggatgacagcctttgccccttccttccggcaaatggacaacatagtctcaatataatggtctgtatccgatgcatagggaacctgataaaacgcatccacattcccggcgtccgcaatccactcaccgggatacacgtcgcagcctatgacccgcataccattttccctgcatttcttgatgacgatatcagccgaaaacgaccctatggctgtcacaaccactgtcctcatttttcgctcctcctgcttactctccacttgttatccctcattctgattgattgattcctgacagcttccatcctgtttactttcttccgggcagcctgtccactgccaggcccctgatataccggaacacttccaggcccagaacccaggatgccagcatgtacacaaccgcgccaaagagaatctgcattcccaggcccagccatcccccaggaacatatcttcccgcaaccatgacagccgcagccataaggattgagactgccaccgacggaatgatatccttccactgttctattatgctgtaattaagaaggcgcttattgggccacgcgttgatgaaggtgcacaggaaatccgccgcagccttaagcgccaccagcaccagtggattatagcgtatgcccactgccagaactgccaggcccaccatcttttttacaatttccaatttaaggaatatatcgctgcgtcccatggcattcagcgcctgaaggttggcaatgtgaatgggccagaaggaataggccacacacatgatttgaagaaagggaacacaggccagccatttttcccccaacagcagcagtaccatggggcgggctactgctataaggcccgccatcatgggaagcaccagataggagctgacggtgatggcccttcgcagcatggactttacacgctccggctcgtcctggctggctgacagcacaggcagcataacggactggatggcggctcccaggttgctgacaatcagcttgggaaactgttctccccggttatagttgcccagcatggattcattgtaaatcctgccaatcaccagtccgtatatattgttatataccgtatccagaagggaggcgcacagcagcttccatccaaaggcgaacatggtcttaatccgcagaatactgaacaaaaggcggggtttccagctgatgctcataaacagaatcagcatgtagaaaaagtaatatgcaatctgctgccataccagggcccatacccccagcccacggcaggccaggaaaatgctgattgcccctgatatcatggatgccacaaaggaggatatgaacaagcccttaaactccatattcctggacacataggcattctgtatggagattacccctcccggaaacaggaccacggccagcacccgcaccagagccgtcatctcctggttgcggtaaaagtatgcgatgccgggcgctgccaggaacaggaccaggtaaatgaccgcggatacagccatgttaaagaagaaaaccgaagaaaaatccgtgtcatccaccttccgcttctgaatcagcgcagtgctgaagccgttctgaaccaatacattggcaatggtgacaaatataagtatgacgcccaccacaccgtactcttccggcgagagcaggcgcgccagtatgatggaaaccaggaactggacaccctgggcgcctccattttccattaacttccaaaacaggccgtttaagacctttgtcgttgtctgtttttcattcaatgcctgttttccttcctttcttcatggaaccgcggacagaccggcacctcagggcacacctttgaaacaggctcccggtcagtccccaatgaacagcatctgccccagtgtacgcaccagcgtgttcttggtaaagccgtacttcacaatcagtcccatttttcccagccggccgcagcgaggcagtcttatgaaagcctccagtgtttcctgctgttcccggttcagacggctgtaaaacatatggtaaaagctgtccgcctgaccaaacatcctcctgtaattctctctggcgctgcttccgtcctttacccgtgtcctgacagaatccaggctgtctcccttctcagctcccagggtattgccgccatgctgcctgtaatagtacaggggcctgtccacccatcctatctctccaaagcaggacgcgataagggccagccatgcatcgtgcataaggcagaccccgggaatctcctttagataaggcagcatactgcggctgaccatcacggcgcctccggtcacattgttctgtaccagaagctggggcaggctggtgcgttccggggaaattttctgataccggaaaaagctgtccgctatgggccgcaaagcctcatccgccacggtcaggtctgaatgcaccaaaaggggaacattgccacggcccggtttccgttccatttctttcatcttatcagacagcatccgcgccttttggggcatccagacatcgtcctggtcgctcagcataaaataatccgccccggccagacgccccagatgggccagctggctttttgtcacctcatactctggcagcaggctcccatgctgaggctgctcctccggaccatgggctgcatccgccatcagcttaaggagcttcaggaaatggacagctgctcctccggacggctccttccgtaaaagcaccagcacccggtccccccggcttgcctcatattccttcagcagttccctggagccgtccgaggaacagtcatccgacaccaggatacggacgtcctcctcatcctgtgccagtatggaatccagctgctgccttatatatctgcttccattataagaagccatcagtaccgtaatcattttgagcgtttcttccttccattcatccatggcagccgtgtctcaatcagacgcaccaccccaggctccactgccagcaccagggcaaaaagcaggatatcccagggcgtactgcctaatactcccggatacatcattctgcctgccgccaccttaaaaaatgcaatgaccggaaccagatgggtacacatgacagtcagggaatgtgttccgtaatatgtaaagaacggcacaagaacccggctgaaaatccgccattccttccagctgcctccgcaggcagacacccgctccccaaacatcaggatggtgacagaggaaaaccaggcggtcagaatccaggataccggattttccatggtcagaaaattaaaatcacaccccggaatcaaaaccgtcaggacaatgcccaggcacatgagcagaaaggcagccgccaaaccggcccggccctttaagtacatggatgccttctgccacgcgtcacaggcaaatgtaccccccagggccagcaggaagcccaccaggcccttgatatacaccataatcggcagatgtatgacgcgccacagagtggtatcctgtctggaaccattgatatagaggatgaggcacacactggccgccccggccagacaggctgcaatccccattttcctgcggctgccgtatatcatgttaaacagcagctccgctatgaacatactgggaaggaaccacagtgtctctaaccccaccaatgtgcccgtataatagatgtcggacatgagtaccaggaaggtatactgctggggccacaccaggaatatccgagagaaaataaacagcacgctgtagcacacatacggaattcccagggatataagcctttttcctgccatctcccggctggatatgcctgtcctttccttcccgtaacgcagcgcataccgccatcctgtatagacataaaaaacagccagcataaagaagccgtaccagtcagagagtatgcctaggctggtctccaccagacaatggctggctaccactcccagcattcccatgccctttgccacatccagatagacctggcggtcctgtgtcttagtcatctgccgtatatccttcctgtcctttgtcctgtcttatccgaaaatctcctctgccctgttcatggcagactcgattaccttgtccatgtcgtagtacttatattctcccaggcggccgccaaacaatacatgggattccgccctggccagttcctcatacctctggtacagctcctggtttttctggtcattcaccggatagtagggttccatgccctcctgccagctcaccggatactccctggtaatcactgtctttggctgtgtgccgaactcaaaatgcttgtgctcgattaccctggtatagggcgtgtcgcggtccgtgtaattcaccaccgccactccctggtggttttcccggtccagcacctgggactcaaaacgcaggctgcggtactccagcttgccgaaccggtagccgtaaaatgcgtcaatggtgcctgtgtataccacggtctctcccaggctgtcatagtgttccctgttttccaggtaatccgccgaagtctctatatcacagccctcaaacagcttctccactatgacattatatccccctatgggaattccctgatagggatcattgaaataattgttgtcatagatataccgcacaggtatacgtttgatgataaaggccggaagctccttgcagtccctgccccactgcttttccgtataccccttaattaatttctcgtacaattcccttcccaccagacggatggcctgttcctccaggttcttcggctcgccagtaatctccgccctctgcttctcgatgatggccttagcctcatccggtgtggatatgccccacatgcggctgaaggtattcatattaaacggcatgttgtacatctggcctttataattggccaccgggctgttggtatagcggttaaactccgccagggaattcacaaattcccacaccttacggttgcccgtatgaaagatatgggcgccgtacttgtgcacatggatgccctccacgtcctcacagtacacgtttccgcctatgtggttcctcttctccaccaccagacagcgctttttgttctttctggcgtaccaggcaaacacgcctgcatacagaccgcttcccactaatatataatcatattttttcatatccggatatgctcctttgcttctctctctttgctttcacaattgtactatgtttcacgggaaatgtaaatggattatgtcccctgccgcccccgcaaggtcccggacccgcaggaaaccatgaaacataaacggacgtacacaaaaacgcggaacacagacaatggcatccctcatttataaagactggatgccatgtctttgttccgcgtcccggttaactggtggtcatgaattgtttcagcgcatgaaacagctggtgaaaatcaatgggttttgctatgtggtaattcattccgctggtcagtgcctttgccacatcctcggcaaaggcattggcagtcagggcaataatggggatggttcgggcctgggggtggctgcttgcccggatcatgcgggctgcggtgcagccgtccatcaccggcatctgcaggtccatgagcactgcctcatatgtacctggtgctgaggaggtgaagcgctcatatgcttcctgtccgttttctgccccatccacttccaggccgtgttcacagagtatggccctggcaatttccatgttaagggcattgtcctccaccaggagaatccgccttcccgccagggaagcacagtccatgtcatcatcccggatgcagtctctcatatctcctgccctttcctgttcctttccctggattctgaaattcagggtgactgtaaaactgcttccctccccctccctgctctcgacatgtatgtccccctgcatagtggacactatgccatgggcaatggacatgcccaggccggttccctgctgctcctgcaccacaggcacgacggccctggaaaatggttcaaacacctgcttcatatattcctctgacatgccgatgccgttgtcctccaccacaaaccggtagcaggcccaccccgctttccccatggggacttcctcggtcgtcactcggatgattccgttgtccggcgtgtatttcaccgcgttggtaatcaggtttaaaagcacctgcttcacccggttggcgtcccctataagcgactcatggatcacacccttccggctgaaggttatgtcatggtttttctccatggcagtgggcttgatgatggaatatatgttatccagcatggtttccagatgaaagggttcctccaaaagttccagcttccccttctcgattctggacatatccagtatctcattaatcagggacagcagatggctgctggagatgctgattttttccaggcagtcccttacccgctccggctggtctgtgtgggatgctgcaagcgccgtcatccctatgattgcgttcatgggcgtgcgtatgtcatgggacatccgggccaggaaattacttttggcctcgttggccatggtggctgattcgtatgctgcaaacaggcttttcttattctcagcttcctcctccagctccttgcgcttctgctcatcaatgcccatattggcgaaaatgaccttggtgacaacgccgtctgcggtctccgcaatgctgaacctggacctcacccatcttataccgtccggatatacccggcggaaatccacatcgtacaccggctgctccggtgtaaggttcgtcctcagaaactccgggcttccaacccgccgcatcttttcctggtcctcctcatagacatgacagcggacgaatttctcataatacacagccatggaacccttgggaaattcctggcgcctgcgaatgatttcctcctgccagattgcctcctctatatcgtgctccaaatcaaacagatagatggaatagtagcactggcacaggttggtcagcacgctctcccgcagctccacctcctgcctggcatcaatattccgccctgttatgagaatccggtcgcccagttccatatggatgggaaccccatagtaacggtaataatgaagcttccggtcccggtcccggattctcagaatgccctccagggattctgtgtccctgtagctgtcaggagaacagatctgttcaagcttttctttgtcctcccggggaagggacggcatcacctggctgagtaattcgctgagcattcccttaggcgctatcttcagccggtctcccatgtaatggaggcagctgtactcctgacttgttgggtccaggctcaggacaagagtataaatcgtggatacagccactctggccgtcacctcgtccatccgtttctccacctcgccgtcctgtatgtcaaaagccaggatagctctggcttttaaatcggattcaggtgcaaacggtatggccataacccgctgccagcttccgcttcggatacggtacaattcctctatctgcttttcccctgacaggaactgttcctgtatatatccatattccgcaaaccgttcaatcctgtttctgaattccggtctgatgcaggaccgtgaatatccgcggagaaattccctgaaatccgtatatttcgtcagattatcctttaaatcctccgcagccttgattatcttataggagccgtcccttaaatcgcacagcaggattcccctgtagcgtccgctcagggtctggatgaccgcatcatattccttctggaacatgatggtatccgtgatgttctggtggtatccccgcaggcggattccatcctcccattcctgatccttcatgccgccgcaccgcacggatataggcccccacaggggatggttccatttatactggacttcctgcacctctgcccgggtactggcaatcgccttggacacggtctcctgcacagctcctttgtattcatcctggattctgttataccatacctggtagcactcctccggtgccggcgcagcgtccagccccagaagttccagcatgacactgtccgcgtgcatgacaggctccctgccctgacagagtatgatttcccacagtcctgtgcgggtgctgcgcagaatgtctgtcttccctttatccgtaaagtaatcctgcatagaggccattcctttctcaggccggaattttcttccgccctctgtgcgtcccatttcgccgcctttcctctattatacacagaaccaccctgacatgacaagcaaataacaaaacacagtccctgcaataccgcacccgcgcctcttcttatatcacaatgtccttatatataccctgcattcataaggcttcagttgttccaatgtctgtccgcaatccgcttccccgtagttgcctatcagctgccggcagccttcaagctccggtttttctcccaaatccgcagcagaagccttcatattggccagcactacaagttcctgaccctgataggtgcgcctgtacgccagcacctgaggatgttccctgtatatgaattcaatctccccttctgatatgactttatattctttcctcagggcaatcagcctcttgtaataattcaatatggagccggaatccgctgcctctgcctgggcattgatataagaatggttctccggtatgcctatccacggctccccctgtgaaaatccggcatatcggctgccgtcccactgcatgggcgtccggccgttatctctggaacgggcagccagcaccttcagcgcttcctccccggtgattccctgctctgtcaggatacggtaatagttaatgctttcaacatcccggtactgggaaatatccccgtaatgcgggttggtcatccccagctcttccccctggtatacatacggcgtcccgcggaacatgtggatgaccgttgccagcattttggcagattccttccagtatcggccgtcatccccgaaccgtgatatggctctgggctggtcgtggttgcaccagaacacggcattccagccgttttcccgctccatgccttcctgccactccataaacagctgtttaagccggaccaggtcaggctccgtcagtttccacttatccccgtccctgtagtccaccttcaggtgatggaagttaaagcacatggataactcccggtcctccggcctgctgtagcggatacagttatccagggtggtggaggacatctctcccactgtcaccatgtcctctatgcccgtatcccgcaccagctcctggagatactcatgtaccctgggcccgtcggtatagaagcggcggccatcccctttgtgatcatcctcaaaaatatccggtttggatatcagattcaccacgtcgaaccggaatcccttcactcccttggccttccagaacaggattacctccttaagctcctgacgcaccctgggattatcccagtttaagtcggcctgggttacatcgaacaggtggagataccattttttcaggcggggtacatactcccaggcatttcccccgaatttggactgccagttggtgggcggcgcgtccgggctcccttccctgaagatataataatccatgtactccggattgcccgcaagtgccttcttaaaccatgggtgttccgtggatgtgtggttaaataccatatcaaacatgcatcccatgccccttatgtccgcttcccggatcagttcctccacatcctccatggtgccgaatacagggtcaactgcccggtagtcagccacatcgtacccgttatcattgagaggggagctaaaaaacggtgtcagccagatataatcaattcccagctcctttaaatagtccagcctgcttatgactccgcgtatgtcgcccaggccgtttcctgttgtatcctgaaaggacttggtataaatctggtaaaccgtactgtccttaaaatgtcccataaatggttcctccttcatatctgctccgtcatatctgctccgacaaatctgccccgttatatgactcaatctatcctggccaccgtatccgccaaagcccttacccttcgtccggtctgccagtttatagctcctgaatttccgggattggtaaggaccatgatgaccatgtcgctgtgccctgccccggcaatcttctcacggtcaaatgcaatcagttcctctccggctctgaccctgtccccgggctttacaaaggccctgaatccgtctcccttcatctccactgtatccagccctatgtgtaacagcagttccatgccgttatccagaaccagtccgcaggcatgcaggctttcttccatgacaacagccaccatggcgtcagccggcgccctcaaaacgccgtcttccggtttaatggccaccccgtcccccagcgccctggatgcaaacacctggtcaggaacatcttccatggggataacttctccggatacatatgcttttaattccctgatcggctggcttgcagagtctttcctttcctcccagctggcttcatggccggactcattttggttctcccggccgccgcctatccccttcttccttcctatggcataggtcaggcagaacggaatcaggattaccagtcccatggcagccgcgaagagtcccatgtactggggctggatggacaggatgcccggtatgcctcccacaccaatggcattggccttgattccgctgacaacagacagcaccgcgcccactgcagatccggccattccgcagataaatggaaaaccgtatttcagattcacaccaaacatggctggttctgttacacccaggtaacaggaaatgcaggcgggtacggatacttcctttgccttggcgtcattcttctggagaagtatcatggccagtacagcggagccctgggcgatattggacagggcaatcatgggccacagggtggtgcctccaaagtcagctatcagctgaaggtcaatggcattgctcatatgatgcagtcctgtgattacaagaggtgcatagaaaaaaccaaaaataccggcaaacacgcccttaaagggggatgtcaggcccgcgttcacacagtctgaaatcacggcgccaatcttccagccaatgggtccaaggatgccgtgggccactgccacggatatcagcagggagcagaaggggaccacaatcatggaaatcatggcaggacatatttttctgaagaaccgctccaggtacaccagggtaaagccggccagcacagccggaagcacctgggcctgatatccaatcatatccacctggaagagtccgaaattccactttggtatctctgccgccgccgtggtggcaacactgtacgcatttaacagctggggcgacaccagtgtgattcccagaacgattcccagggcctgggtcgttcccatcttcttggtgatggaccagacaatgcacacaggcaggaaatggaatacggcttcgccgataagccacaggaagctgttgataccagcccagaatacagatatctgggtcagtgtcttagtgccgccgtcaaacagggcaatctccccgatgatattgcggaatcccagaatcagaccgcctacaatgatagccggaatcaagggcgcaaatatctctgccagactgctcatgattctctggataagggtctggttctgcatggcagccttcttcaccgcctccttggagactccctctatgcctgccacctccgcaaaatcattgtaaaaggtactcacctcattgccgattatgacctggaactgccctgcctgggtgaatgtgcccttgacagaggacaggctttcgatggcctctgtatccgccttggacggatcgtttaacacaaagcgcatcctggtaacacagtgtgatacggctgcaatattctccctgccgcccacatactccaacagtttctttgaatccccggtaaactttcccacgttcaatacctcctatgaatctgaccacgaaacagcatcttgtttaaacaagtttcttatattcggattatatcttgtttaaacaagtttgtcaatgatgattttgactttttccggtgtttttcacattctgtacctaaaaagcaccggacgaacatttgcctgaagctccctgttctccgatgccttgatttacctactttgtccgatgggccagatcgtaaaatacgaaccggtccggtctgtgcctggactgggtgaactcaaacatgactccctccttgttataggtcatgctgctcaccactgccatacaattataatcctttaaatccagatacgtttcatcaatctggttgacgcgctccacggtcattttcctcttggtggtcacaatgctttcacccaggtccttttccatatattcatagatggaacgctccgcgatctccggtgtcaggtcccgtaccacatcctttaagaaatagttgtggtcaatgattaaggcttccccctcaatgcagcgcacacgctggatataataaatctgggctcccacaggaaaggtggtcctcctttgtatggtctcatccacggtcagctccgcgaaacagaccaccctggtggtatagttcttcctgttcctggccactgcttccttcaggctctctatgccgcccagtatgaactccgactgctgctgtccgggctggtaaatgattctcactcccttgccgtggatactctgcacgtatccttccgacgccagctgcccgatggcccggcggatggtattccttgaacagtcaaactcttttaccagggtattttccgagggcagcagttcctggaacccgtaggtcccatcctccatcttttcccggagcgccatataaatctcattatattttgtctttgccatataaacctcatacatctctttttataatgggtctgccggataaatcccctgcgcaaaccaaaacagttttgtccgttttaaaccggcatgccccggaattatccgagaggaattcctaccacatacagccgtatgaaaaacagtaccattaaatgcagcgggtaaaaccaatagaaggcgtatttccatggtgcctgtcccttttttccgttgtaaaaatacaggggaacagcagacagaatccctgccccataacatatattccaggattccagtaaagacaggataccgccggacatcacctggacaatgcgcttctcccgcaggagataaaacaatgagataatcagtatcccatccatgtcgtaatccgccttcaaaaacacagcggccagacatccgcctccgattacggccgccatcccggcggcacggcgcggctgtgttaagccctcgctctgtttcaggccccggagcaccagcagcccgattgccagctcaacgtacacgttgctgcttcccccggcccacgtattccacacagccaggcggaaaggaatttccgagataagcgcaaacgcagccatcctgagccagtatctgcgccagtcccttgtatgaaggaatccctccaccagcaaaaagcagtaaatgggaaatgcaatcctcccaactgttctgagcatccgccacagccaataaagggtatccccccattgggatgtcatgagcatggcgacctgttccaggttcccccggtagtatacaatccgttccagcagcacagctccaatatggtccgcaagcatggtggccatggcaatatatttcagggcggtaccgcttaatcctacctgtatttccggtttctttctgctgaacggcatgccttcattccttccttatatctaatctatctatttatcttatcaccgggtgattggtttgcaaagtattttcttcacacattctttatgaagccaccagcttttcccccttgtatttatttccacatgatatataatgctctataagacttctgctaaaaagatgttaagaaatggaggattttatgaagaaaaagacacaattcttgttaaacctggcgcttaccgccatcttttttattttgatcattttccaggggcccaatctgaatcccctgtatccggatggggcattttcatggtgtttcatcatcagctgctatgtggtgctgaactttttcgtagccctgggcagtgtccgggtaggtgccaatgaatacggccgcccgcagatcagcattgacaaaagtgtaaggggttataaaaggggcttcgtccttctcgccatcctttgggtactgtattttggcgtttccatcctgtccatgcccctttttaattacaaggcctacagggaccagttaggcgtcccggccgtatcagaattcacggatacggtacagccccttgctttggaccagcttccaatcgtggacaagagtctggcaagagagctggccgataagaaggtgggcgaaaatcccggcctgggaagccaggtcatcctgggtacccctgtcatccagaaggtagacggaaaactggtatgggtcgttcccctggagcattccggcttcttcaaatggcttaaaaacatggacggctccgcgggttatatcgtggtgtcggccagtgatgtcagcgacgtaaccctggtaacagactataaaatcaaataccaggccaacgcctacctgttagacgacttaaaccgccatgtgcgcttctttggcggcggactctttaaaggtcttacagactattcctttgagctggatgatgacggcgttccttactgggtcattacctcctatcaaaaccgctggctctttaacctgccggaggccgacggagtgctgacggtcaatgccaccacaggagagaccacccattataccatcgccacactgccggattgggtggaccgcgtacagcctgagaattttgtaatgcagcagatacagaaccagggtgtctatgtgcacggcattttcaacttctccaaccaggacaaattccgccccagccagggtgatatcatcatctataacggcgcccgctgttacctgttcacaggcctaaccagcgtgggatccgatgaatcagccattggcttcatactggtggacatggtgaccaaggaatccaacatctaccagatgagcggcgcaactgaaatggcagcccagagctctgcggaaggaaaagtccagcagtttggctaccgggcctccttcccaatgattatcaatctggacggacagcccacctacttcatgaccttaaaggataatgcgggcctgattaaacagtacgcctttgtgtctgtctccaactataccaatgtgggaaccggagagaccattgacagcgccctgcgcaatttccgccaggtgcgcggaaacgccggagtgaacattaccaccggccagaccatttccaaggaggagggcactgtcctgcgcattgccagtgaaaccatagacaatactgtcacctataaactgatactggaggaaaaacaggactatatcttcaccgtgtcctatgacctgagtaacgagctggccctgacccagccaggagacaaagtggccctggagtacatggatgacccgtccggaatctgctccgcgtcatcctttgacaatctggaatttgaccagtccgggcagtaatatgacgatcctcccagagactggcgcagacctgccgcagacaggttaagcacaaaacaacgcaaaaaggaccggccccaaaaggccggtcctttaattgatttaataccattacatccaatataacatacccaatatcagctgccaattaatagaacagtctgttcaccgcactgaatatgccgcggagggaagcccttgtgatgttggagctgatacccacgccgtaagtggccttgcctgtcacctggtctaccagatggatgtaggaagcagcctctgcaccggaaccggatgccaatgcgtgctcactgtagtccagaaccttaatctggatgccgagggcatcctccatgcctctctgaacagcatcaataggtccgtttccaacgccctcaaatgtcttctcaataccgtgatctgagtaagtcaccttagccagtgttgcaaactcgccgtctcctgtctccgtatcggttatgcggcattttctgaagtgcatgggttccttgcgctccaggtagttcttcttgaattcctccatgatctgctcaggtgcaacctcaccctgctgctcggaaatcttctggatgacatctgcgaattccttgtgcataccctttggcagcttgaagccatagaaggtatccatgacaaaggccacaccgccctttccggactggctgttgatacgcacgattggctcgtactccctgccgatatcgctgggatcgataggaagatatggaacctcccagtactgtccgtttctctcatgaagggcctgcatacccttgttgatggcatcctgatgggaaccggaaaatgcagtgaacaccagcttgccggcatagggatgtctgggcggaatatccatcttggtgcagcgctcacatacatctgcaatctcacggatattctcaatgttaagttcagggttgattccctgtgagaacatattatatgcaactgtcagtatgtccacattaccggtacgctccccgttgccgaaaagagtaccctccaccctgtcggctcctgcaaggagggccagttctgtggaagccacaccctctcccctgtcattgtggggatggatgcttaatataatgctttccctgttcttaaaatgtgtattcatccattcgatctggtccgcatacacattaggagtggtcatctccactgtggacgggagattaatgataatgggattttccctggtagcgccccaggtctcctgcaccgctgtacagatatcaagggcaaaatccagctctgtgccggtaaagctctcaggggaatactccagacgaatctgggtatcgcagtcagccatataccgctggaccatcttggttcctatgacggctatgtcctttatatcttccctgtccttatggaacaccacatccctctgtaaggtggatgtggaattgtagatatgtacaatggccttcttaacaccttcaagggcctcaaaggtcctcttaatcagatgctcgcggcactgcaccagcacctggacctccacgtcatccgggatgagcttgcgctccaccagagtgcgtaagaaatcatactcaatctgtgatgcggcaggaaagccaacctcgatctccttaaagcccagcttcacaagaaggttgaacatctccaccttctcctccaccaccataggctccacaagggcctggttgccgtcccttaagtccacgctgcaccatatgggagccttcataatctccttattcggccatgtgcgctccgggaaatccaccacagggaccctcttatatctttgataatttaacataattcattcctccattctgttcatctgatttcaggcgcctgaaaacgcctggttccgtccatattccaatctcacttcatacggtgtcctgttccactttaaggtgatatttgtatcttcactcctgttttgaaacttcacttgtgtcctcagcccattccgggcagtcgctcaataacaccgtaatgacggatgatgaacagcacgactcttactggttcagccccatttcacatcattcctttgctctgaaaatcgctggccgtaaggacccacgcccctgtcagggccatacggtaaatgcagaaatcccggagcacggcgctccgggatttctgttgtcctcttagcaacgttatctaattatagcacatttcaaaataactgacaataaggagtcgccggttgactattctcaatagttatggcttttattcctctgtttcataaaatgtactccaagactccctctttcattttcagggaatggttcacagcaccttgcatacggccctaaatgcaatgcccccggtccttcataacctggattacctggtccacatatgtctcgcaggtctggatatcaggcgcctccaccatgacgcgtaccaccggctcggttcctgactggcgcagcaggattcttccgtcgctgcccaggctcctggtcaccctggccacctcagcctgcactgcctcgtcatcctgggctgtctttttatcctttacccgcacattcttaagtacctgagggtaaatctccacctcagaagccagcttatcaagaggctgctttttctccagcaccacctccatcacctttaaggaggtaaggattccgtctcctgtggtggcatgtttgctgaatataatatgaccggactgctctccgcccagacagtgcccggtggcggccatgttctcatacacatatttgtcccccaccgccgtcttcacataggcaatgccttcccggtcaaatgccttatataatccgaaattggacatgatggtggtgactaccgtattattgaacaggcttccctgctccttcatgtatttgccgcagatgtacatgatgctgtccccgtccaccacgcggccgttcttatcaaccgcaatgcaccggtccgcatcgccgtcataggcaaatcctatatcgcatttctcatctgccacaaacttctggagatgttcgatatgggtggagccgcagtccgtattgatgttcagtccgttgggctcattgttcatcacatgtgtctccgcacccagggcgtcaaacacgtttttggcaatggcggacgcgcttccgttggaacagtccagggccaccttcatgttcttgaaggaacgggtggcaatggatataaggtatccgatatagcggttccggccagctgcaaagtccacggtccggccaatatgttccctttttgccagcgggatctctcccatctccccatcgagatatttctcaacctccaggataacggactcttctagcttctcgcccttctcgttgatgaccttgatgccgttgtcgtaaaatgggttgtggctggcagaaatcataattccgcagttaaatccctcggtgcgcaccacataggacacgctgggggtggtggtgacatgcagcagatatacatccgcgcctgaggctgtcagccccgccaccagggaatattcaaacatgtagctgctgcgtctggtatcctttccgataaccaccctgcagcgctcatccggcgtcttctgtccatagtaccagcccaggaaacggcctaccttgtaggcgtgctccacggtcaggtccacattggcctcaccgcggaagccgtctgtcccaaaatattttcccattgttattcattcctccctgtcttgttattaaagcccccgttacatgcctttgccgcagccgttccgcccccggtttatgccatcccgttgtccttaagagccttcaggtaacgctccagcgcattctgccatgagggcagacgttcaaagccgttctccgtcagcttttccttactcatacggctgttggagggccgctttgccttggcagggaaaccgtctgaatccacaggggtcaccttcacctcatccatgccggcctggcggaatatctcacacgcaaactcataccagctgcacagcccctcgttggtggcatggtagcgcccgtacttgtctgtctgaatcatatccaccagaaggcgggccaggtcgtaggtatatgtgggggaaccaatctggtcatttacaacggatacagcccccttctccttccccagacggagcatggtcttaatgaagttcttgccgttgacgccaaatacccacgcgatgcgcacaatgaaatacttctgtacattctgctccaccgcaatctcgccctcatactttgtcagtccgtacacattaaggggttctctgtgatcatcgggctcccatggccgttcaccgccgccattaaacacatagtccgtgctgatgtacatcatcttgatatccatggccttgcagaccctggctatattgcgtgtcccctcagcattgattttacggcacagttccaggttatcttctgcagcatctactgcagtatatgctgcacagtggataactgcgtctggtttttcctgagaaatcacagtttcacacgctgtgcggtccgtgatatccatttcctccacgtccacaccgaatccttcaatgccgcgaagggccagttcatccatcacgtcatggcccagctggccttttacgcctgttaccagaactttcataatccatttacctccgttcttaataatggccggcgaaggacaggaattcccgaaacggacacgtctcacaaacgtgctccggggcatttccctcctccgtcagccacatgtttacctacaggcggctgccgtacatcttatcgaaataattgctgtactcgccgctcagtatattcttccaccagtcctggttgtccaggtaccaccggatggtctgctcaattcctgtatcaaaattatacgttggcttccatcccagctctgtttctatcttggtcgggtcaatggcatagcgcatgtcatggccgggacggtctgtcacgaacttaatcaggctctcaggcttatcaagtgccttcagaatggtctttaccacttccaggttggtgcgctcattatgcccgccgatgttatagacttccccctcgcgtcccttgtggataacaaggtcaatggcctggcagtgatccgccacatggagccagtcgcgcacgttctcccctgtgccgtatacaggaagctcctcatctgccagggcgcggctgataataaggggaatcagcttctccgggaaatgataagggccgtagttgttggaacacctggacacggtcaccggcaggccgtaggtcctgtggtacgccagcacgaacaaatcggcgcttgccttggatgaggaataagggctggaagtgtgcagaggcgtttcctctgtaaagaaaaggtccggtctgtcaagaggcaggtcgccgtacacctcatcagtggaaacctgatggtagcgcttgatgccgtaggtgcggcaggcgtccagaagggttgtggttcccatgacgttggtcctgacaaaggcctccgggtctgtaatggagcggtccacatggctctcggccgcaaagtttaccaccacgtccggcttttccttctcaaacagttcaaatataaatttccggtcggcaatgtcgccctttacaaatttgtagttaggcttgtcctctaccggctttaagttttccaggttgcccgcataggtcagcaggtccaggttgatgatttcataatccgggtatttatttaccatgtggtgtacaaagttgctaccgataaagccggctccgccggttacaataattttcatgtatattttcctccgttaaaaatcctgtgggtgtatcttatccacatactttccgtccagaacgtcctttaaatacttgccgtactggttctttttaagaatctcataggtctccataacctgttccctggtaatccagcccctgaggtaggcaatctcctccaggcaggcaatcttgcggtgctgatgtgtctccacagtcttcacgaagttggtggcctccaccagagactcatgggtccctgtatccagccatgtaaagccctgtccaagaagaatcacatccagctcgcccttctccaggtaaatgcggtttaagtccgtgatctccagctcgcccctggctgatggctttaagttcttcgcatactccaccacccggttgtcgtagaaataaagaccggtgacacagtagttggacttgggcttctccggcttttcctcaatggaaatagccttgccgtccccgtcaaactccacaataccgaagcgttccggatcgtccacatagtagccgaacaccgtggctcccttttccttgttcgctgcggcgcgcaggcgcttggcaagcccctgtccgtggaaaatattatcacccaggaccattgccacggaatcgcttccaataaattcctcaccgatgataaaagcctgggccagtccgtccgggcttggctgtaccgcatagctcagctcaatgccgaactggtggccgtcgcccaaaagagcttcaaaccttggcgtgtcgtccggagtggagataatcaggatatccctgattcccgcattcataaggacagacagcggatagtatatcattggtttgtcgtaaatcggaagcagctgtttggaagtcaccttggtaagcggatagagccgcgtcccgcttcctccggccagtataatccctttcatatttcctccttggttcgctgtaagcgcgaaaagaccgcttagcgcacatctttacctgaatttttctttgtccaatatatcacactatctctattttttcaaataaactgataaatatttcgttattattaagaagatatcaatatacataactactgaaggatttccacaccgttacccacgtcccccacttcacccacagggttgtcgcggatgtccagatactccagaaattccgcctgtttcagaggggccaggtccgttatataattgtccttaaggctgagtcttttaaggttcttaagacctgcggcaaaattcagatccgccagctcgttgctgtccaggtacaactcctccagattagggaagcgggacaggatatccatatgttcccccaacttcacatcatcataccacacactggtcattccgccgtaggattctacataataattcttgtgaagctccatatttctgaggcccagcacccgcaggctgggattttcctttatcttgtcaaagtttatctcaaatttaccgttatccagatacaattcctccaggccctggtggttaaaaatggaactcacatccccatacacctccaccaggtagttatagccactccagcccgttccgtccagattaccggtgaagtcagcatatttaagtcctgtcatgcctttgaggaagtccaggtttctcaaattcccctgggaattccatacagagtaaaatgtaagccgttccaccccggtcagggatgagagggcgtccgcctggtccacattgcagttgtgtatggaaagctccttcagactgctaagccccctgatagaggaagtggacataaagcccttgatttccagcctttccaggccggagagggatgacaggtccgggtccggctgggacgtcatcttatcaatgcttaaggacgtcagccctggggctgttcccaccggtccgaaatcctgcaccttgttatttcccaatagcgtcagggagcgcagagcgggcacctctgacagggaagccaggctgatgacagcagtatcctctaacgtaaggtcctccaatgcaggaagtcccttgataaagccgatgtccttaatgatatccgaattcaggtacagggatttaagaccgcccatcaccgagatggcagagtaatccttcacccttatcttatccttgtccgtgctgataatggaatcagagtccaccgtgtcttccagcgacaggtaattaagactctttaacggcaccagctgctttaagttggtgtcgggataatcccggacagtcaggcgttccagattctcaaaggatgcgattccctccatagaggtaattcccttaagctgcagctctgtaatctgtgccgggtcgtccagcatatcctttatgccggaaatttccacatttcccgctgtgatgcccttaagttccttaagcccctttaaagtgcggaccctggacagccctgaccccaaatccagtttcaccagtcctgtaaaagccgccgcgtcctggggctcccagtccatggccccaaaggaggccgtctgcaccaccggctccttttcgctgtaagggtcgtcgaagctgtaccatacccggtctgtttccagggatgtctccactttaagatacctgactccggccaggtcctccgggctgatttccgacggttccttttggaacatctcccatgtcatggcatgaaacaggggcgaatctgcctttggagccgtttccccctcccggacttcctcccctgcttccccttccttccccaagtatccggccgggcgggtgtaggcgggaattgacggcggagcggtccgcggcccggaggaagaaccggaaccagaggacaggataaaagcagccagcagaacgcccgcgcaggccaagccagcaccaagggctattttggccccgtttccctggtctttgccggaaggggttgtctggtatatagtgtaatttgtaatatgctggactttctcatcgtccagcaggaactggctcccgcagtattcgcatgttataagctttgtctgtgaatcctccaccttaagcttacccccgcaggaagggcattttatctctaccattttcataaacacatttcctctttgcctttgctggtaatcgcggtttcaaaccggaccgcttcgcggcctcatatgacaccattataattcatttcaggcaggtatggcaagcaggtttgcagtcttaccgcagcagcaagagagggacaacccgtgcaacaggtgatgtccctctctcgtttaccatttttttgttttttatacggttatgccgttctgccgttgaccgccttcatgaaccgccctgcaatctccagcggccgggtgatggccccgcccacaatgactgcccatgctcccatatccagcattttcacagcctcctccggcgtgtggacacggccttccccgatgacaggaatgggaagttcttccgaaagccgcctgaccagctcaaaatccggtccttccagcctgggggtgtaatccgtatatccgctcatggtggtgctcaccaggtcaattccgcttttccacgcctgaatcccctcctgataatcggagatatcggccatcagaatctgatccggatatttttctttgatggtcccaatgtattcccatgggctcagcccatccccacgcttcctgtctgtgcagtcaacggcaatgatgtcggcccctgcctccgccagggcgtccacctcccgcatagtgggagtgatatatccgtcatatccctcatacacctgcttgatcagaccgatgacaggaagccctgtctccctcttgattcccaccacatcccgcaccgtgttggcgcgtatcatggggcttccggcctctctggccgccctggccatataaggcatcagggtacgctccgggtcatagagaggttccccgggcagggcctggcaggagatgatgagctttcctttgatacggttaaatagttctgttttgtccatttcgttccaatcctttccctccggctttcacggcctctcatcagccacagccaccttaaccacacattttttgatatcttcaggctgttccaggcatccgcccggcccatgagcctcccctgccatgcacagaataaacctgccgggccccataacgcagcgtccccctgctcctgcacaggctgccgccttctgaaaatccggccggtattccccaatgggagtcacaccgttaagggccgtctctatgacctcgcaaccgtctatatctatctggatatccatataatctctgtgcacttcataactctcatccgtcagctcatgggtcctggcctccatcacctgcagaaataccatgtccccgtcaatctccgtctttcccaaaggaagggtgtttatatccacagacatcagataatcaatggccttatccagattcctgttcatgcccctgtaatttcctatattagccagcaaatcgtatatcatatcagcagtatttctcctttgcggcttctatcatggcggctgcctccccggcaatggcccggtcgccatcgcataagtctgtcagcggttttcgcacgcctcctatatcaattcccctgctgacccgcagcacttcctttatcatggcatacatattacaggttcctgaacagagcttatatataatttcatccgcatcatactggatagccctggcctctgccatcctgttttctgataccagatcatatatctttaaaaacagttcgggcatggctccgtaggtgccgccgattcctccatccgcccccatggccagaccggacaccagctgttcgtcgggtccgttgaacacgataaaatcctcccgtgtcttcatggcctcggccttaaacatctggatgtcctggaccggcatggatgagttcttcacgcctgccacacgtccgtttaagagcattgtccttaaaagactcatggtcagggccgtaccggccagctggggtatgttatagataataaaatccgtatcaggcgctgcctctgatatatcattccagtacccggcagccgaatattccggaagcttaaaataaatgggcggtatggctgcaatcccgtccacacccagggactgggcatgggctgccagaatacggctgtcccttgtgttattgcaggcaacatgggctatgaccgtgagacggcccgcggcctcgtccatcacagcctccagcgtctttttcctgtcctccacagactggtagatgcattctcccgaagacccgcccacatagacacccttcactccctggtccacaaagtacctggtcaaggcccgcactccgtccccgcttacctctcccgccctgtcgtagcaggcgtaaaatgccgggatgattcccctgtatttgtcaagcttcattcttatttcacccccgttatctcagaaagttttaccttcctgttctcaaaccgggacctggtgcaggcgtctgccgtggcaatggcgttcctggcagcctcccctgtaagcagggccttaaactcctcgtccggctgggcgccatgcatgatattgttgaaatactccatctcatcatacatgatgctgtgaagccacatgggaggctttttcccgggtttgccgtacatgatggcgccgtccatctccgtgccgtgatagattctggtgcggtcatcatcctcctcctgggttttgtgcataaggaaaggttcttccttatcccccttcttaagggttcctccgcagttgaacatatccaggcggatggcgccctctgttccctgaatcagcacataatgttccggccagtggaaggcggatccgtactccagcacagcgtatctgttatccccgtattccatggtgatgaacagcatatcgtcctcatccccaaactgctctccgcagtgggccacattgccgcccgccatggtcacttcctcggggcagccgcccataaggaactggatacagtccagctcatggatgtgatggtagaggtggcctcctgattttgcccttattttcttccagctgactgagggctgtatatcctcccagccgttcctggccgagtggcagtatagcacctttcctatgactccgtcattaatcatcttcttggctgtgcgcacgcccttaaaaaagttcattacatggcctgccatgaaggtgacgttgtgggcaacgcatgcctccaccatctccacgcagtcctgataggacagggcaatgggcttctcacagaatacgtgtaccccatgctccgccgccttgatgaccggttccttgtgaaggtaattgggggatgccacgattaccgcgtccacgtcttcacggctgtatagccggtccaggtccgtctccgtgtcacagcccagctccgccgccactgtacctgcattctccgggtcatagacagccactaccctggccccctcctgctccttcatgatgcgggccagctccgccccaaaatatcccgttccaaccactgcatatccgattgtcttcatgactgttctcctttaccgtccatatttttcacttcatgatttcgctgagttttaccttcctgtcttccttaagggacagggtgcaggcgtctgccgtagcaatggaattcctggcagcctcaccggtgagaaggggaaggaactcgtctgtaaccggggcgccgtgaagcacattgttcagaaactccatctcttcgtccatgatgccctgaagccacagaaagggctttcttcccggccttccgaactggttgccgttgtcccgctccgtctccctgtaaatccgggtcctgtcatcgtcctcctcttttgtgcggtgcaccaggaaatgttcttccttttcccctgtcttaagggtcatgccgcagctgcacatatcaatctttatggctcctctggttccctgtatcagcagatagtgctcctgccaccggaaagcggaaccatattccaggaccgcatagcgcctgtccggatattccatggtgataaacagcatatcgtcctcatccccgaaccggtcgtccctgtgggcagcattgcctcctgccatggtcactgtttcaggacagccccccataaggaattggacgcagtccagctcatggatatggtggtacaggtgccctcctgatttggatcgtgtctttttccaggtttctgatgcaccggttccctcccaggcgttgcgtgccccgtggcagtagagaatgtccccgataacgccctgtccgatgagttcctttgcctttctcacaccacggaagaaattcatcacatgaccggccatgaataccacatggttttcccggcatgcatccaccatctccctgcagtcctcaaagcttaaggcgatgggcttttcgcagaacacatgaagtccatgccccgccgcggccagcaccggctccttgtgcagataattgggtgtggccacaatcaccgcctgtatatcctttctggataccaatgattccaggctgtcctctgcatcacatcccagctctgccgccaccggacctccgttttcagggtcatagacagcccgtatctgggccccttgttttgtattcatgatgcgtgccagctccgccccgaaatagccggagcccaccacgccgtatccaatggttcccgttataacttccataaaatataactccttttccctttctgttaaattcatcaggacttcacagcgccctccgacatgccgcctgcaattttgttctgtatgaggcagaagaaaatgacagagggaagcaccaccagagcagatgctgccatcatgtctccccagtccagtatctcagctccgtccagggagcgcagggccaccgcaacagtcatcttgctggtattattcatcaaaatcaacgcatacagaaactcattccaggtgttgatgaaggtatagatggccgtggccaccacaccgggcgccaccaggggaagcaccacctggacaaaggtctgcattttattggccccgtcgattctggccgcctcctcgatttccaggggtacggtcctgaagaatccggtcagaagccacaccgcatagggcacggagaaggacaggtacacgataaccaggccaatccttgtgttaatcagtcccagctttcccatgaccacagagtagggaatggccagaaggatgggcgggaatatgtaagtggtcaccagcaccttggacatggctgatcccagccgcttaaagaacctgacgattccataggctgccagcgcagccaccgtaatggcaatcagggttgtcaccagggagatgataacgctgtttcttatattgacaaaaaacttaaggtcgttgataacatgggcgtaatagtcaaaggtccatgtctcaggccagaaggccgtgggatttcccgtcagttcacccttgcccttcagggaggatatgataatccataccagcgggaaaatggagataagggtcagaataatcaggtatatatggctgataacgtttcctgctttaaactttttcatttactgtcctccttttcccacttattgatgaccgcgaaatagatgccgcatataatcatcaggaatataaacagcagcacggtcactgccgatgaacgtccgatcagcttggtgctccatcccatattgtaggcgtagagcggtatggtctgggtggtgcccgccggtccgccgcccgtaatcaggtaaatcaggtcaaagttgttaaaaatccacacggtccttagaaccaccagcagtcccaccaccatcttgatatggggcactgtgacatagtagaaggactgccacggcctggccccgtctatctgggcggcctcgtactggtccttgggaactgtttccagagccgagagcacatttaccataatcatgggcgctccgaaccatatattaatcagcaccaggcttacaaaagccagcgtaccgctggtcagaaactggggcgcggcctcacagattcccagcttcaccaggatattcggcaggaagccgtacactccgttgagaatccatttccaggaaaatgcaatgacgatggagggaaatgcccagggaatgatgagaagggtcttgtaaacgcccttacacaccttaatccgcttcagggccagggcagcggtaaaacccactgctatctgtcccaccaaggacaggaccgtccatttcagggaattgaaaaatgaaagccagaagccgctgtcccttaacacctctgcataattcttaaagccaatgaatttataggccggcttaatcaggtttttgtttgtaaagctgtatacgatgctggaacagatgggatatatgaataatgcaattacaatgacgattgcaggaagtacaaacaaccaccttgtataacttttcttccccaagatttcctcctccttctcagtattagagcgtgtctcaaaaatgcatgcgctttttcagacacgctccgcgacaacttattcagctgtctcaaacagtgcgttcagtttatcttctgctgttttggcagcagtctttacatctgtcccgttggtaatgatatcctggaacatatcctcgatcacatggttgttctgcataataccggcctggacattaggaccgtgctcataaccaaatgcagtaccgatatcggctgccgctgtcagcacttcctctgcatgtgtaaactgcctgatggtgtcatcatccttgtatgcatctgtgtcagcgattcccttgatggcaggaagcatgcccaccggggttgcgtgcaggaattcgacgtatgtatcctcatcataaagagttttcataaatgccttgcagatttcgggatgcttggaagccttccacacaaccataggcgtgtttgtggtcatgattccctcgtccgggtcatccgcgttgatttttggaatcggatagcagtccacatactggagcaggtccggcgagttggctgcaacacctgaaatctggaagccggagttaaaatcaaatgcggttttgccctggtaatacagggtagcctggtccagcacatcaaagttaatggaatccttaggcgagcagtcattgtataccttcagccagtagttgatgccgtcaatggccaggtcgctggtcaggttggctttcaagtcatcggtcagcaggctgcctccgccgcttctcacatagaaatccaggaaaaaggttgcctggaagtcatttgtcccgcatgggaaggacagtccgtagacgccgtcctttgtaagggccttggctgtgtcgtaaagctcgtcccaggtctttggaacctccagaccgtttttctccagcaggtccttcctgatccacatcacatgggcgtgtctgtaaaggggaacagaatagttattgccgtccatggtgccctcggatatggctgcctctgcgaatttgtcacggccgatgtcgtcaatcaggtcattgatgggcgtcagggcatctgcgttaatcatctccgcaacctgtgccggaagggcggtgctcatatcaggtacattgccggatgcaagcccggtggtccacttggtataaaagtcattccatgagaatgtctcaatattgattttcacatccgggttttcttccataaatttgtctgccgccttctggatggtctccagtcttggcccctgggtaaatgaatgccagaacgtaatctcacctgaaagcgctccctctgttccgctgccgcttccgtcctggctccccgtatcctgtgcctgggactggcttcctgcttctttggaaccggaagcctctgtggatgaaccggaactgccgcatccggccaacagtgctgctgcaagtgctgccgcaagaataaagcttacatgactctttttcatatcatttctcctttttctgaattatttccgtccgtcattctgctgtttctataggtattatattgattttctttatgcatttcaacattctggacaacttataatagcacaaaacaaccactatactatttttttatccagttttggttttgagcaggcagggacctgtccccgtatctttgggagacaggaaaaggacagggccggaacctgattccggatacctgtccttttgtatctgatgtttcttatctctgctccctgcttcctattttcactctcctgctgtttccgtcacaatccattccttcttaatctgccacagggccgcctggacacttttagccccggattcctcccctgcccgaatctgctcatgatgacgaaacagcctgggccagctgcccatgattttctgtttcagctccggataaaaaccagtgagaaccgcgtccatctccctgaccccccgctgctttaaatacgcctggaaagccagctcatccgcctcatcttcgcccaggtatttaaggcacagaatcttattccagtcatacatgtcaaaaaacacagcctcattcctgggaacacagagcgtcagtgtcctggttccggccgactggtccaggctgtacaggttcataaaggaccaatagggaaattccgccccctcaggtttgggaaccagcttcgctgcctccttcacgaaccatctgtagacagtcaggaaaatagggccgctttccccatattttctgcgcacatactcctcacgggaaaaacagcggccgtccctctctatggcctttaatacagcatctgcctgtgccgcgtataaaatcaccttatcacctgtgtcacccattcttttcttatctcccatatatttccatattttgagtcattccctaaaatcacactgtcatcaaaaagccggtcccagctggcaataatttccctcttaagatggggatagaactgggacatgtatgccttggcatcgcttaccccgtactgctccatcatatcctgatggcgtctggcatccgccttatcctttggtatgtaggagtaattgaggatgcttccccatttttctatattgacagaggtaatacggtccggttccagggtcagctccagtataacggcgcccggactgggaagcatgaccgcctcactggtaaatgaaacccataccggatactccacatccccgggcttcctggccgcgtccggactgtgccttaccagccagtcatatacctccagcaccagtcccgcatgctcctgcaggtcactgcggatatattcccgcctggcaatgtacctgccattttcattcagctccttcagcacattttcatgctgctttgtccataccttgatttgttccatcccgccatccatcctctctctattgttttgtcacccctactcctgcgacatcttcctgtaccgtcccggcgtcatcccaaacgcctgcctgaatacccgtgtaaaatggttggcatcctcgaaccccacatcgtgggcaatacagttcacaggatcattggaaaccagcagaagcctggctgccgtggtcagacgcacctggcgtataaactctgtggcggtcttccctgtggcctccttaaacagacgcctgaaagtagtctcagccacttctgccataccgcttaatttatctgaggtatattcctctgtgggatttaacatgatataatcaataacggtctgtatcctggggtctgtctgcaccgtggatttcttcaccctttttcgtatctgctccaggttgtactccaggccgttgatctccgccttcacatcatccggctcatcggagttcagaatgtcaatcagactggcgatcagagtgtcaagggctcctcttacgtgaaaggattttgactttttgtccgtgcgcacccacttatagatatcgctgaaataaggttcgattccctcccccacatccatcaccaggggaaagttatagtactccctgaggaaattggccccctcgtagaacacggatgtggtaaaacggatgctgtaaaacgcaaacgtatcctccagcgccttacatgacagccagcagccctccggtatataggacacctgtcccttcctcacaatgaccgtctccccgtctaccacaaactcagcgcttccgtcaatgatatagcgcagcatattgtacggtatggcgctctccggatacgtccaggtacgtccgaaggagtatttatctatatacagaaaattaaaccggatggtattcatgaatgaggaaagcgactgcatgatgtgcaccccccttttacagtattgccttattacttccggcccaccggcacttccggtttcgtaatcttaatctgcccgccgtccggacctttatattttgattgtatcaaatcacgcccccaatagccagacccttgacagaaaattttatccgatgggattttatacacatatttgtccacacaggccgccgcattcccttcctgcctcttcccggcctctttccggctgtttgcctctcaccgcccgattcccagctgtttaatcagctgttcaatcccctcaggactgtccgcatatgttttcaccggcgccccaaccatttcaccgcactcctcctccgtaatggtgccatggcgcaggacaggcccctgttccagctccacggtgtagttccagctgacctgtcccaggttatcggtcagggcaatgagcacacaggcatatgctttcatccgctcctcaaacacagctgaattggacgtgctctcctcaaagttaagcgtccagccatagggctcaccggaggtctggagctcattcttaaagcttcccaattctcttgatattcccaatgtgcctgagagccttccgtctgccgaggcatcgcctatatacggattcctggccctgtacagttcattggccaggctgctgatcaggtctccgttactcttaatcgtaataccctggatattcaaatccattccaccgccgggaagcgccagttccaggttaaatgtgccgcttctgttccagaatgacggcagacaggaatagatgaccagcctctttgccccgtcctcctgcaccagcttatatcccctgtaaacagcggctgaatctgccatgactcctcccacattcacctgttccccattgacatcggtgtaggtgagcacatatgactccgtgggatatcctattacaaacagcttcataaaaagtgctgccgccataaacaggaacacccctgccgccgccagaaccacgttccttacattctttcttcttacctttttcagataatcaatttccggcggttctcctgctgtttgggaagcatccccttccatctctgccttcatccgctcatacatttccctgcaggtctcacattcctccagatggctgcggatttcccggtccgttgtttcagacgtcaggccgtccgcatacataggcattaaatcctgaataatctcacatggtattctgtggttcatagttttcctgcctccttcacgactctctctttcccgcggtaataggtcacccttgcccagttctcgctgcgccccatgatttccccaatctgcccgaaagtaaggtttcctaccagcctgaggtacataacctccctcatggggtcctccaggccgtgaaccagcttcagtatctgcacattgtcccataaacaaagagcccgggactctgcggattccacagatacctgttcagcctcatccaggggcacatggtctttctgccttcgcagataatcacgccacagattcttggcaattgcgcagagccaggtggatatgctgctttctcccttatacccgccgatgtgtttcacagcctggtaaaaggtctcctgggtcagttcctctgccaggccggggtcccgggtcctggttaagagaaaaccatatatcatttttccgtgtttcatataaatttcttccatggaatccatatacgcatttcctccttctgttaattagtgtcccgtacccaggattcgttacagataaataataataaaacagacccggccagaaccaggaatataatatcccggatatctggctgggtcctgattgctttgagcccattgccccgtttttatgttctgaagccctattgaggatttttctctcaggccttgggtatatccagtgtctgtccctcatatatcaggttcggattcttcactgagccggaattaagctggtaaataagctcccatttcagaggatctcccagggctgctgtggttcttgcaaaacgggaatgcctcgctgggggaagatggtttctccacgtcaatctgatagtagagcggctcaaatattgctccgtccacccgcacttcctcttggccgtcatccaccagaaacagacactaaacagcctcgttcatccttgccagctttgcagcctggtcggccgcaatcagattatccaatagctcctgaatatccccgttcataatagaatcaatcttatacagtgtcagcttgattctgtggtccgtcacgcggccctgagggaagttgtaggtacgtatcttctcagagcggtcgccggtaccgatctggctgcggcgctcctctgcctctgagctctggcgtttttccagctcaatgtcgtacagcttggaacgcagcaggcggaatgccttttccttgttctgaagctgggatttctctgtctggctgtaaataacgattcccgtaggcatatgggtcagacgaaccgcggagtctgttgtgttgacgcactgtccgccgttgcccgatgcgcgcataacgtcgatacggcagtcgttcatgtcaatctgcacgtccacttcctcggcctcaggcataacggccacagtggcagtggatgtatggatgcggccgccggattctgtctcaggcacacgctggacgcggtgcacgccgctctcatatttaagcttggagtacgcgcccttgcccgtaaccatggcaaccacttccttgaaaccgccgatgccgttttcattaaggctgacaatctccaccttccatctctggctgtccgcatagtttgaatacatgcggtaaagttcggccgcaaacagagctgcctcgtctccgcctgcgcctgcccggatttccagaatgatgttcttgtcatcgttagggtcctttggaagcaggagaatcttaagttcatgctccaggtcctcaatccgctttctggcatcggacagctcttccttggccatctcccgcatctcctcgtcgttctcttcctccagaagggccaggctgtcctccacatcctgctttgcctgcttgtactgcttataggcctccacaataggagccaggtcagcctgctccttcatgagcctggtaaaacgcttggtatcctgggtcacatccgggtcacccagcataagcatcagttcttcataatgaatcaacatatcatccagcttatcaaacatatctatctcctgctcctgcgattattccaattccaaccactacattaacctgttacctgtgtttctcccggtccggcatcccggtccgcgccagccgggcgtttatgtctaagcgtttatgtccgccctctcacccccggcctcacagcctggccctcaccacccggtcctgtcctgccagatcctgaaatgtcctcacatccctgtatcccccggaccggaacaatccttccactgcctctgactggtcatatccaatctccatatagatacttccgccctccgccagatgattccgggcctcttctgccaggattcggtaaaaggtcagcccgtcatcacttccgtccagggcaatcctgggctcatggtcccttacctccggagcaaggccctctatgacccggctgggaatataaggcgggtttgagacaatgacatcaaaggtcctgtccgtctccagagcgctgaacatattgctctcaaacaattcaaatccgccctcgtatccgcccaaaagcctgtcacggtttccggctgccaccttaagggcctcggccgacacatccagagcagccacatgacggtatctgcccatgagcgccaggctgatggcaatgcacccggaaccggtgcacatgtccagtacgcgtttttccctgtccttctgttcctccaggaccagctccaccagtgtctccgtgtcctgccttggtatcagcacatgttcatttacaaggaactcaaatcccatgaactcctgggtcccggtcaggtgctggagaggggtccggcctgccctggcttctatgagcctcataaattcccggcattttccctctgtctcctcatccttccccagctccctggccttcagggccagaaaagacgccagattcagatgaaatacctccagaagcagatacctgccatccagctgcggatccggcaccccggccttattcagttcctgaacaccctgccacaacagctgctgcatggtcatgttttactgctccttcactgtcattgcctttaccatttctgctgactttatcattttcactgctttcatcatttccatttccgccatcatagtgcctgcttttctgccatcccggaaaattctcatccagataagcccgccagtcaaacactgtctccactgccgcgatagccacctctatcatgctgtcatccggctccgtggttgtcagtccctgcatccacatgccgggacggctgagcacattcaccagccgtgagtcatggcgtcccgcaaaacgcaggaactcataggacacgcccgcgatcacaggtatcagcacaatccggctcaccacacgcagccagaccgtatccacccgtatcaccataaaaaacaggatgctgataaccatgacaatcataataaagctggtaccgcaccgtttatgctccttggaacttgcccttacattgtccactgtaagctccagcccgtgctcgatacagttgatgcacttatgctctgaaccgtggtacataaaggtcctcctgatatcctccatacgggataccagcttgatataggctataaaaatgacgattcgtattacgccctccagtatggccatcactgtgtcggaatggatgaatcctctgcatatattggcgataaacaggggaagcaccatgaaaatgccaattgccataacaaaggaaaataccataaccactgtcatgagcgcgctctccagcttctcgccgaagaccttatccagccacgcctcaaatttaccgggctctgcctcctcgtcgtcctcaaaaaaactgcaggaccaggtgagggccctcatgcccactaccatggaatctataaaactgaaaatacctcttacaaagggaagacctaatactttatgcttcttggtcatactcaaataggtatcctttttcacctcaatatccccgtccggcttgcggaccgcaatggcgtagtcattgccgttctgcatcatgatgccctcgattacggcctgaccaccaattcctgaatatttcattcctttaacctttctgctgtacgaaaaagaaaccctctttccatgatttcccatgaattcagaaagggctgagcctgctcccaagctcaaccctcatctctttgcttattagttagcattcatgccatatttacgattgaacttatcaatacgtccacgagcctgagcagccttctgctgtccggtgtagaatgaatggcacttggaacaaacctcaacgtggatgtcctgctttgttgaacctgttacgaactcattaccacagttgcagacaacctttgcctggtaatagcttggatggattccttctttcatgattttcacctctctgatattatttgcggtttccgaccgcggcctgtgtatgccaatctgtctctgtacattacaggcagccggccgtatgccgtcaccagaacgcacagatatcagcaataactaagttaaacgcgtcctcaccgtaaggttctgactcacgcgaacgctaaaactgccgtcaattcagacagcttacatagtatatcatagaaccccgggacttgcaagatatttttttgaaaatgtggacaaatatctagctggatatggggtcaggatatagggttacttccagcactccggaagctcaggttcccgtaccctcaccggctcaggataaatctcaccatgcagttccagctccacccgctcaataatttccggcttcaccggacggttgacctccacaccttctatggggaaatccgtcacaggcactgtctctaccttttccagcctgtataactcatccatgccctccagaacacggccgaacacaggataaatgcccttgtggtccggacagtccctgagggggaagaaaaactcgcagcctgccagtcctgcctcaccgtagccgcccatgcacacggctccgggatgggagtccaggggtaccacgtccgggttcagttcaaactcattgggaatcagataccggcattccttcttaccaaaggccgtgtagctgacatccacccagtttcccggcacaatccgctcaatggcatggtggtccaggtatcccctggaggctgtatagataaagctgttcactgtattgggcgctgactccggcaaaagctctatgacaatgttcctgccgttggccatatgtaatgttgcgattggattcatatatcctcctatataacctctgttagccggttacggatgaaccgattatctcaaattccttggaatagtggttgagcacctcgcatccatcctctgtcaccagcaccagatcctccacacggacgccggtatccccgggcagatagattcccggttcaatggaaaatatcattcccggctccgctttctgggtattcacagaggacacgtctccgaactcatgctctcccagaccgatgaaatgccccagcctgtgggtaaagaaaggtccgtatccctgttcagcgatcaggtccctggccgccccgtccagctcgcacagaggtacgcccggacgtatctttgagatagctgtctcattggcgctgcggacaatctcataaatacggcggtgctcgtcactggctttgcggaagtaaaaggtacgagtcatatcggaacagtacccgtccttgatgcagcccacgtcaaaaagcactgaatcacccggctttataacggtgccgtccggtccatgatgagggtccgccgcgttggctccaaaggccaccagcggttcaaaggaaaaaccgtccgcccccaggtccatatatatcttaagcatctggtctgcaacctgacgctccgtgacgccttcatgaatcagcgttttgaacactgccatggccttatcattgatgtcagaagcagtgcgcatcttatcctgctcctcctcatccttaacaccccttgtcctgtccacggcaatggaggaatttacaaaaccggcagcagcctccatctccataaggggcagcagaaaccgggcctttaaatccttatcaacgcccagcgggctctccttatccagatagcctgccacgatttccgccgccgggtctgtatccgaataccacaccttctccacacccacatcctcaggcacggtaaacagtttattcagaaaatacacatgtttcccgtcctccctcaggtaaagggcataaaaccgttcaaatggctccacatacacgcctgtgagatagtaaatggacatggggtccacaatcagcatctgtctcagccccatttccttcagggcttccatgatacgctccgctctcttctgcttcatgataatatcctcctcttctaaaactgctttctcagcttggggtccagcaaatcccgaagaccgtcgccgataaaattagcgcctacagccattgtaaagatcgccagtcccggaaagccggccacccagaacttattgaaatagtcagctccatccgagaccatcataccccactccggcgttggcggcgcagagcccagtcccagaaagcttaaggtggagaacatcagaatctggtttccgatgtccgtggtagccataatcagaaccgaactgatgctgttgggtatgacctccttcatcaggatccggattctggaggcgcccagaacctcggaagccgccacatattcattttcctttacactcagcaccacgctgcgcatcatacgggcataggtgggccatgccaccacaatcagggcaaacatggtgttaaacaggttggaacccataaccgcattgataatcattgccaggatcagggaggggaaggacaaaatcatctctgaaaaacgcatcatcacattgtccacccagccgcccacatagcctgctacggctccataaaatgtaccgataaaacctgctatgactacggtaaggcagcctgccagcagggaataccttcctccgtagagcacacggctgaaaatgtcccttccaaaattgtccgtgccaaaccagtgctctgaggacggagcctttaaccgctgtcccaggtcctggacaatcgggtcatagggagccagcgccggcgccagaatagctgccgcaatccatgccagacagataattacgcccagcgtaaacaggtaattggatttaaataaccgctttatagactgtaccatcagctgcacctcactctcgggtcaatgattccgtataatatatccactactgtattgatgaccatataattcagtgcaatcagcagggccaccccgatgatggacgggaaatccacagaaagcacggactcataggcaaactgccccacacccggccagttgaaaatggtttccaccagcaccatgccgcctaacaggttgcccaggcccagaccgatgacagtgagcacaggaatcagggcgtttccaagggcgtggcggataatcagtcccggccttgacaggcccttggcctttgccgtacggatatagtctgtagacataacgtccagaagattggagcgggctgtcctggtaatcagtcccatggtaaaggccgcaagcacggttcccggaagaatcagatggctggcagcgtccagtgccttggggatatttccctccagcagactgtcaatgacatacatgcccgtaaccgtggccggcgccgtaaaggcgttgctcaggcggcccggacccggaaacagtttcagcttgtaatagaagaaatataataccagcagggcaaaccagaagctgggaatgcttacgcctgtaacggatatggcccgggccgtctggtccaggatgctgttgcgccggatggcggatataatgccgaacagcacccctaaaatggcggcaatcacaatggcaaacaaagccagttcaatggtggccgggtaacacctggccagctccgacagcaccggtttgtttgtgcgcatggaagttcccaggtcaaactgtaaaagattcttcatgtacaggatatactgcacgggcaggggctggtccaggccgtattttgcccggtaggcagccacgatctcaggatcatttaaggctctctggctcaagttagccacggtggggtctcccggtatcattttcgtcagtatgaaaaccagggtggcgacaccaaacagcatgactaccagatacaccagtctttttcctataaatttcagctgttccatacgatacctctcttttcttatgtttcaatccatgcttatataaaattaaattttatgttgtattccagtctcatacagatattcccgtcaacggtatcccctccgggatggacgttcacggcaatacctgctgccgcttaaacttctgacctgaccgggccggggccggcgccagacagcactgtttacggagcctgcgggcaggaagatatctgcctgcccgcaaaacagttccgtatataacattattacttcacgttaatcagagtcagatccagggcataggggtctgatatggccactccctccagcctggtgttatagccgatatgggacggagcctgcgccaccataatgaagggcccatgctcgtacattgcatcctggatttcctccagaacagcgatacgcgcgtcattgtccgttgcagacatgtttttttcatacatggctgccagctccggatccatgtcggcgctccatccggccctctttccaaccactccgcccggaaggaattccagctgcacgttggggtcgttataatcggttccccagtacataaccgtaaagcccagggttccgtcgcggtaagcatcgccgtatcctgctgcccatggctgtgaaacaatatttacattgattcccacctgtgacagatcatccttaatcttctgggccaggtctgtcaggagaattccctccatatccaggtctgtcacagtcaggtccacatcaaatccgtccgggtatcctgcctctgccagcaacgcctttgcttcctccagatttgtatagtcagcaggcctctcgcccttgcttcccatgaatcccacctggatgatatcataaggagtgatggtgccgcttccgcagatagtctggataccggtataatccagggccttgcggatggcattctgaacctgggggttggacacagggccgccgtaggcttcatccatgttcatcatcacaaatccaactgtcttggttgctccgttgataatggaaatattctcagcgccttccagctcggacatggtgtcgtctgtcatgttcatggccacatcaatatccccgccggacaatgtcatcatctgtgtgttggcatcaggctgtatcttaataatgaacttgtcaacattagtggcttctccccagtaattgggattcttttccagaacaacttcctggtccggaatatagctggtcatcacatacatgccggaacccgcgctggccgtatccagataagactgggctgtatcggcggatgacgcgtcctctgcgtccgtgccgccgtgttccttcacaaccgcgctgtccagaacagccgtggagctgtaggttaacttggacagaatagcgctgtcaggctgggtcagatggaacaccaccgtgtaatcgtcaggggcttccatgctctcaatggtatcgcagataaaggatgggtttccctgaaggtttttgcagcggttgatgctgaaaagaacatccgcgctggtcatgggattgccgctggcaaatgtcacatcctgtttcagcttaacggtcagtgtgagaccgtcctctgaaaattcataggtatcggccagacaaggctccggcgcgctgtcattgctgtagaacttaaacaggttctcgtagcaggcattgacaatgagaggcggatacttctcatatacataccctgggtccagggtggaaaatccggagcccatggctaccacaaccgtattggaaccggctgcctgtgaagccccctcagtagcggcgtctgtcttgccggccgttgtgccgtctgcgccattgcctccgcatgcgcttaaggcaaatgaaactgcaaggcacagagccgcagtcaataacttctttttcataatagacctcctctaggattattgagatgccagtgttctggcagtgtctccatattacaatcttttactggttccgtgtttcctcaggctggtgtcttcagaccaggatcttcaggccggtgaagccctaatacaggtggcaggccacaaaatgcccttcagccacttcctttaaccggggcacttcctggcggcacctgtcgcaggccttggggcagcgtgtatggaaccggcagcctgagggcggatccgacggactgggaacctccccctccagatggatccgctctgttttcacatcctggtccacctggggaatggctgataacagcgcctccgtatacgggtgataacgcttttcatacagcttatcataatcagcaatctccaccatattaccaagatacatgacccccacccggtcgctgacctggtagaccacgttcagattatgggaaatgaagaaataggtcagtcccagcttttcctttaactcctggagcaggttcagcacctgggcctgaaccgatacatccagcgcggatactgcctcatcgcagataatgatatccggctccagagccagcgccctggctatgccgatacgctgcttctgtcctcctgacagctcatggggatacctgctcagacagtacaaatccagtcccaccaggttaaggagcttcataatgcgggcctccacatccatcttccccttcatcccgtgtatctcaaagggttccatcagaatctggcgtacggtacgcctgggattcagacaggcagaggggtcctggaatataatctggaccttcctgcgcattttctttaaatctgctccctttagccctgctatgtccgttccgcccatataaatgtggccctccgttggtttcaagaggcggacaagggccctgcccagggtactcttgccgcagccgctctcacccaccacgccaaaggtctcacccttcatgatgtggaagcttacgtcgtccaccgcctttacggtcccggacttcttatcctttcccttaaaatatacctttacatggtcggccttaaccagcacttccctattgctcttgtcttcatttatactttcgtttatgtctctgttcggattctgtgccatacattaagcctccttccccgcagcctggtcttcaaacagccagcagcggaccttccgctcctctgaaagctgcttcatgggcggactgactgtcctgcaccgctctgtggcatgaggacatctgggccagaagctgcaccccttgatccgctccgtggggttgggcaccatcccctctatggtggacaatggcttcctgtcctttgtgatgacaggtatggcattcagcagcccaatggtatatggatgcttgggatcccggaacagttccccggccggcgcctgctccacgatatggcccgtatacatgacaatgaccgtatcgcacagctcgctcaccactcccaaatcatgggtaatgaacaaaaccgaggagtgaagctcctcgttcatctcgcgaatcaaatccagaatctgggcctggatggtcacatccagagccgttgtgggctcatccgcaatcagtatctggggctggcaggccaatgccatggcaatcatcacacgctgcctcatacctcccgacatctgatggggatactcatgggcccttacctcaggattggcgattcccactgctttcatcatgcggatggcttcctccatggcttcctttttcttcatgccccggtgcaaacgcagggattccgcaatctgtttaccgcacttgataatgggatttaaggaggtcattggttcctggaaaatcatggaaatttcatttcccctgattttctgcatatcgcgctcagaggtcttcaccaaatcccttccaaggtataaaatctcccctcctgtgatctgtcccggagggttgggaatcagctgcatcattcccagagaagaaacactcttgccgcttccgctctctcctacgatacccagcttttcacccttatgtaatacatagctcagatggtccaccgcctgaacggtgccctctgctgtcctgaattccacacataaatcttttacttccaatatgatatctgtctgtgtcattttatccgccctttgttttattgcatcaaagcgtcaatgcggtgccaatgtattcacccgcagttttctgcatatatactcaaaacgataccacattttcggggataattcaatatatagattgacctgttttgcccggaaacaggtcaaaaccagcatagaaacgcataaacaggacgctgccaaggctgttttaacagcttatttacagcgtcctgctcttatgctctgttatttcttactcttcacatcccaaggtttcttccaataaatggcatccacattacattctttcatacattcgccgcactgtatgcattccctgtctcccacctgtctgacatccattttacaggtgcgcacacagcgcccgcagtcaacgcaggtatccctgtcaatcctcacccccagcaaagccacaggggcaaacagggaatagatggcccccagaggacagaggatgcggcaaaagcttctgtacagaaaacaggcgcttaccagtatgactgccagcacaagaaccttccagtgaaagagggcccctgccagaccgctcagggaatcgtccagaagcaccaggggaattcctccctccagtgtccccgcgggacatatgtacttacaaaaggccggaacaggaaggccggaggctgccttaaataccaccggcagtataatgacaaacactgccaggatcacatatttcaccttggacagctcctgtgtgacacggttcttttttatcttgggaacaggtatcctgtagagaagctcctgcaccaggccaaagggacagaggaaaccgcatatggtccttcccatggtaaccccaaagagcaggagaactcccaatatatagaagggaagcttcctgtccatggcggacagggcattctgcagggtacctaaaggacaggatccgacggctcccgggcatgaatagcagttcagtccgggaacacatagtccttttgactttcccttatagatggacgcctccgcaaatcccttcaggttcagattatataataatgccgcacaaagctgtatcaaacgccgtttcattgctgctgccctctcatggtcatagtcttctgccgctgccctcttatccgattccgatgcattccaggcacaccctcactgccttgcggaaggcatcctggtaacctccctgggcggctccggtgcacaggaatactatgccaagaacaagaaggataaccgccaccttattctgtctgcaccaatccatcatatatcaacgctccctgtcttacaccccaagggcttccttatatctctcatacatcgtgtccgcgtccagggcaccggtggatatatgggtcaccctgccctccgcgtccaccaccactgtatagggaatggaattcgtgggatacagcatggatatggaatactcctcatccagcactaccgggaaggtgtatccgttctcctccacaaaatccttcactgtcccggcatcatccccgcagttcaccgcgataataccgattttgtccccaaaatcatccttcaggcgctcaaaggccggcatctccttgacgcatggaccgcaccaggttgcccagaaattgatgataacaggctttccctgcagttcagacagcgtaatgctggtgccgtcaataagctcccctgtaaaatcaggagcttgaacaccctccttaataggcatgcccggcttgaactcaatcacgccgtccccctggtcagctgctgcctctgcatctgcctggctgccgtctggggacggctcccggcctgcttcaccggcttctcctccttcccgggtcttttccggcccggattcattgttccctgtatccttcggcttgtcagttcccgtgccgtttttctcagtttctgcgctgctctcctcagccgccgtgccttccttttcagtcccctgggcctgctccgttttctggtcagccttattctggtctgccgtctggctgcatcccgttatctgcaaagccaggaaaatggccagcgccgcgcctgcagcactccttttcacggcctttttatttctgtaaaaatgttctctcctcatgtgttattcctcccttttcaactattggaatagacaaagaaacccagagaatgccacttgtgccattctctgggttttactctaacataattattattttctgtccacccggctttatggggtttgtatgaaagttttattaagctttcatgaagatgcctgctacacctcatctaccacgggaaccacttcccgctcgctgtagtggtgtgcttcctcaagcatcatatcctttaccttcataagccttgtctgggagcttcgctcattctcatccagcttcatggtgatatagcggatgtttgactgggtatcgggaatcatcacatgctccagcgcgtttacacggcggcgggtcttttcaatctccgctgccatgagctggcaggatttttcgcactcagccagacgcagcatgtcaggcagtaaatctgccagactctttaccgcatcatccaggtcactggaagtaaatgcaaagccgtaggaatagatgtcgttagggtctgaagtcctggtcttatacttgaacacaggaatctccacactcatgacgttttttgtctcagtttccagatagacctcctgcttgggagccatcagggctacgttcagggcctcatctgtcatgccggaacgtgccagcacgaaattctggttagccgcagcgatgcctgcctccaccttctcgcggagggccttgttctcacgcaccaggtccaggaactgacgcatcaattcatcccgcttgtctttcagaagcttgtgcccgcgaatggctgttgccagctttttcttaaggcgggtaagctccatacgggtgggatttacatgttttgcacccatgttatgtcaacttcctttctgccggccggaaacctgggcgcgcatccataccgcacatggcggcggggctgcacaccctggctgtccctgccgggctgtgactgccagttattttgcttcgtaatataaatcaaggaatttgtccttaatacgtttcagctcgctccttgggaggatgcgcagaagcttccagccgatttccatggtctcttcgatatcacggtcagcatagtagccctgggatacatactccttctcgaactcgtcagcaaacttggcatacagcttatccatatctgtcagggctgcctcgcccagaatgatcatcagttcctttgcgtccttgccgcgggcataggctgcaaagagctggttcatgacatctgcgtggtctgcgcgtgtcttgccttcaccgatacccttatccttaagacgggacagggatggcagtacatcaataggaggtgttacattcttacggtacagctcacggctcaggataatctgtccctctgtgatgtagcctgtaaggtcaggaataggatgggtcttatcatcctcaggcatggtaagaatcggaatcatggtgatggagccgttcttgcccttctgacgtccggctctctcatacagggaagccaggtcagtgtacatatatcccggataaccgcggcggcccggaacttccttacgggctgcggaaatctcacgcagagagtctgcgtagttggtaatatcagtcaggataaccagtacgtgcatgttcttttcaaatgccaggtactctgctgctgtcagagccatacgcggagttgcgatacgctctacggcagggtcgttagccaggttgatgaacatgacgcttcggtcgatagcgcctgtctcgcggaagctctccatgaagaagtttgcctcctcaaaggtaatacccatggctgcaaacacaacggcgaaggactcgtcggtgccgcgcacctttgcctgacgtgcaatctgggcagccaggttggcgtgcggaagaccggatgccgagaaaataggcagcttctggccgcggaccagggtgttcagaccatctatggcggaaacgccggtctggataaactcctcaggatagcttctggctgccgggttcataggcaggccgttgatatccatacgcttctcaggcaggatgtcgggaccgccgtcaatgggcttgcccatgccgtcaaacatacggctgagcatatcctcagacacgcctaactccatggtacgtcctaagaaacgcaccttactggaatccaggttgatacctgtagacgcctcgtacagctgtaccatggcattgccgccgtctatctccaataccttgcagcggcgtctctcgccgttaaccagctcgatttctcccatctcatcataggttactccctgtacgccgcggaccagcataataggacctgctacctcttcaattgttctatattccttgggcattagaagtcctcctttctgctcagctcactgttaatctctgactccagggtcttgatgacatcctcgtaaaccttatccaggtcagcttcctctgtatatttgaaacggccgatagcctcgcgcacaggaaggcctacaagacgctcgatattcacgccctgtgccagagcctcccctgccttgtcatagtatgccagcatcagcatcatcatcatgtgctgcttcttcaaggacgtaaatgtatcaatctcatggaaagcgttctggtgaaggaagtcctcacggatggaacgggctgcttccagtttcaggcggtcaggtgcggataatgcgtccatacctaccagctgtacgatttcatttaactcagactcttcctgcagcaggcgcataagacgggcgcgcagctcggtccagtcgctctccacctctgcgttgaaccatttttccatggtgtccacatacagggagtagctggtcagccagttgatggccgggaaatgtctcttatatgccagatccgcatccagggaccagaatacctttacgatacgcagggtagcctgtgtaaccggctcggaaatatcgccgcctgcaggggatactgctccgataacggaaagagcgccctcgcggttgtcctggcccagggagataacacggccggcacgctcgtagaactgtgccagacgggaacccaggtatgcagggtaaccttcctcaccaggcatctcctccagacgtcctgacatctctcgaagagcctcggcccaacgggaagtggagtctgccatcagggctacggaataacccatgtcgcggaaatactctgcaatggtgatacctgtatagatagatgcctcacgggcggcaacaggcatgtcggaggtattggcaatcagcacagtacgctccatcaaagacttgcctgtctttgggtccttcagttccgggaactcgttcagaacgtcggtcatctcgtttccgcgctcgccgcagccaatgtaaaccacgatatctgcgtcagcccacttggccagctggtgctgtacaaccgtcttgccggaaccgaaaggtccgggaacagccgcaacaccgccctttgcaattgggaacagacagtcgataacacgctgtcctgttacaagaggcatatcaggggacagctttctctgatagggacggcccttacgtacaggccacttctgcatcagtgaaacaggatgctcctgtcccttctcgtctgtcacaacagccactgtatcggtaaccgtatactctccgccgctgatataggtaagggtgccgctaacgccaacaggaatcatgatcttctgctgtaccacatcggtctcctgaaccgtaccgatgatgtcgccgccgcctaccttgtcgcccgcatttgcagcgggtacgaaggtccacttcttctcacgcttcagggagggaacctccacgccgcggtttaacaggtttccgcctgttttctccataatggcatccaggggacgctggataccgtcgtatatacttccaatcaggccaggccccagctccacgctcatgggtacgcctgtggattccaccggctccccgggtcccagtccggatgtctcctcgtatacctggacggaagccttatcgccatgaatctctataatttcgccaatcagacgctgttcgctgactcgaaccacgtcgaacatgttcgcgtcgcgcatgccttctgcgatgaccagcggaccggctacttttttaattacgcctttgctcatcttttacctccattgttattgcccattaaatataatatccgagccaactgcctgctccactgacttcttaactgccagaataccttttcccgtattgcctgatatgccgggaatcagtataatggccggaaggccagcctcacggtagcggttgatctccggttcaatctgggcggccagggcctctgtaatgtaaattactgcatagccgctttctgccagatccttaaccttctttcctgcctccgccgggtctgtcaaaggaaatggttccagacccaggctggcgaaaccgtagatactgtcccggtcgcccataactgcaatcttatacatacatctcccttatcctttcccggatggactcctcgggaagatggtttaatttcccggaaagcacaatccgaactgatttaatctcgttctcccgtgccagaatataagctgccagcggacccagaccaaaggcgctgtactgctggggcttaatcttacgaatcagcagattgtcgcaccaccgctcaaaagctgaaggtgaacgccgcaattcttccactgcatctgcataggccgtggtttccaggtatgaaccgatggaatccacgccttctatggctgcctgagccagacgggcaacgttgatgctgccgcatggtgccagcgcctgttccaggaatgccctgtccttgccggtacgggatgcccgcaccgccgtctttatatctgccgccgcaacggtcagctccgcatagagttccaggaactcattgccggaggatttgccggctgcgcagattgcatccagggctgctttgtcgattatgatatcgcagagctgtccgtcctgggtgtgaaggagagccttgtaggcttcctccgcaggtgttctcatggccgccggaagattctggaattccctggtctgaactgcttcacgtatgagcttcacatccacagtcccctgctccataaagatgcccgggtattcatcacccatacggacctccttgatggctgccttcagattgtggtagtcgttggcgtacaggaacacgtcgaataccgacatatcctccaccagctcgttaatcagctcccaggtcttcctcttctcaatggccaggatgtcagcggcatttgtcatgccgtcctctccccagcccttctccataagaagctggatacactcgtcatagtcttttgcagccgtcagctgctctaaaaatgcaccggatagcagggacaattctttggaacggatgcgggctactgcataaacatactgtttgtctgccatttaattagttcctccctacgttcatgaaaacagaatctcctgcactttatcctgcaatacctcatgtgctgcgtcaaagagagcgtcaatggaacagttctcctcaattcctccataagtaagcacaaaaccgccgtctatatcccgggtgtctccggatatgcgcagcactgcccccttgtccttaagagcggcatttaacctgtcctcaaagccttcgggcaggcgttccaagtccttctttgagaacaggagctcgccttcgccggtctgtgcggatttaactgcaagtttcagaatcatatcaaagtaggcaccggtctcaagccctttgagttcggccttagccatcccaatggttgcgccgatgagtctctgcttttcagccagaacagcacccctcttcttaagttcggctgccgtgcgtcctctctccagaatgttggctaccgcctgtttggagcgcctctcaatatcaacgcactccctctctgcgtccgcacgggcctgtgccagaatctcatctgccttggaacgggcttccgccctggtgcgttccgctgctttctgggactcttctttaatctggctgatgatcttatctaatcccgccatgccatgttctcctttccttaagtctcctatttggtatgctgattaaatgttaagtcctgcaataccaaagatggaaaggatggagatcagcagtgccaggatggcgtaagtctcaaccatggccgggaaaatcatagctttaccaaactgctcaggtctcttggcaaccaggccgatacttgctgctgctgccttgccctgtgatgcgccggaaatccagccaacaatacccataggaaggcatgctgccagatataaagcgccctttaccaaagaaaggtcagcgcttccgcccataataccaatctgtgtcagtgtgatgaatgcaatcagcagaccgtagataccctgtgtaccgggaagcagctgtaaaaccagaaccttactgaacttgttaggatcctctgtaacaactccggccgcagcctgacctgcaatacctactccaatagcagaacctactcctgcaaaaagtgctgcgattgcagctcctaataatgctaaagcaactcccatatttcccataactaaatgtcctccttgactttataatatttggtgtgaacggcaaagggctcaaatttccttccgccgccttcataaaactttccaaaaaactctacatactgcagacggttagtatggacatatgcgcccagggcattgattgccaggttcaggctgtgtccgattaagaataccagtatgaatatgattgctccgggaatggaacctcccatcatacttcccatcttgttaaataccgtggatataacgctggtagccagacccagggccagaagtctggaataggacaggatgtcgctcaggtatgagctgactccgtatgccccgtaaagacccttaagtatcctcttaacccagtttttggactcccgtccgctggtaagtacaatacccacaaaaccaatggctgccgcataagctgccacggtgccagcaactgccggaagcgtaaaggtaagacccagcatctcggtaaacatggacatggtcagcaggtatacaataccgccgccaaccagcatataccagaatatggcgtcataaataccgtcagccaggctgccgttcttcacacaggagtagaatttgattccaagtccaatgaaaaggtgaagaataccaagtccgaacgcaaataccagaagcttcataggaaggcttaccggttcaaaccagagaggagcaagcctgatatccggccggttgaagaatgtggtcgcgataacattaaccgcatctccgaaaaagctgccgaacataaagccccagaatgttgtggagataccacagtacatgaacatcttcatgaacttcttcattccggcttccatgttcttgaatttagtaaggcagtatgcggtacctgccaccatgataagaccgtaagccgcgtccgagagcatgagcccgaactgtacatagtagaacaatgccactatcatggacgggtcaatctcgcccttggaaggaacgctgtagctctcaataacgccctccaccggttctgcgaacttattgttgtggagcaggatgggcacatcctcctcgtcgcccggttctgtgtactctacaaccacctcatacttttcctgaagcagcttttcaagctttggagccgcgttctcaggtacgtatccggttataaagaatacgcgtcttgactgggccaggccgtttaacacaccgtatttctcagcacgcatggtatagtaatccataacgaactttatgagttcccggtccggagccatctccgccacagccttttccgctttctcaatctccgccttttcctttgcaagctcttcttccagctgctgctggcgttttgcaggcactgctgagctcaggggcggttttacaaaattcattttcttcagagcgtcctccactgcttccgcatccgttttcgcgcagacaatgaaaagacaggtctgctccttggacgcacttacaatggtcacgtcaattgtctctgcctgaggtgccagctccccaagctgctctgttacctgttccagggtaatttcatcctggatggaaccgataaatgccgcagttttcttagttcccttaaaatcaaggggcaggtcaaaggatctccatggcaccagtgcttccatctgctgttccagctttggaaccgccgcactgtgctcgcctatctgcttggcaagttcctgtaagcggtaggcttttttcatgacctcgtcgtgtttgcctgcattggcctcatattcgtccagggaaagcacttccctgccttcgaacgaggacagcatgcccttctcctcaggcgcgtacctgtccagaatattaatggcctgctctgctatattggcatttcgttcaaatacggttttggaagacgtcacgtccattctgcccaacatgtcatcttcctgcagcacattgctgatttcaagtaccccttggcgctgcagaagctcaagggtgcccttgcgatcctttttcagaccgcatatcagcacttttttcataggcactactgccaaccttaagcgcctcccttcctatagcagttctgataagataacttcaactgccttttgttgtttctcagctacagccttctgcaatgcttccaaatccttgccttcctcggcaccggccgcctgcatcatctgctcgctctgagccttggcatcctcctcggcccccatggcgccttctctggcagatttcgtcatctctgccttcatctgcgccgcctgagcctttgcctctgccacaattgcctccgcctcttttactgcttccttctcggctgcttccgcggccgtttctgcctgacggattgcgtcaatcgtctcctgggccaatccaaatccccctttctgtaccggaatcccgttagctatcctgccggaatatatggttagtttgcgcagatatgcctccgggaatacgatggaccatacgtttgtgttgcaaaatgacaacttatccagtatttgtccatagctttcctattatttttgtacaatatgaatagattataacccatgcataaaaatttatcaatccactttctcaatatttcatgaaaaaattttagactttctaaatatttttgtacagcatacaaaaaacttctatccatattttaatagctgcccccttaaacatcacatccggcgggacctatttgttacattaataacaaatttttttattaaaataggctgcagtcccaacgccttccatctgcgtcataagctacagcctatttaataacatcatatcattttatcctgttatttgaaacagtaattttttaacatctttttaacgcacccggactaatccgcaataatcatccgtttctttccgccgccgttcatcaggctgtagtatgcaggaagcataagcagcgacagaatggtggatgcggtcaggccgccgatattaacaagggcaagaccctgtgtggtggaaccgctgtcgcccagagcaagggccatgggcaccatggacacaaccgtggtcagggtggtcatcagaataggtctcagacgggtagcgcccgcttccaccagagcagtatttaaatccatctccctgcggtactggtttaccgtatccacatacagaataccgttattaacaaccgtaccaaccagcatcaggaatcccagcagggatgtcatgctgatggcgctgtctgccagccacaaaagaccaaaggcacctatgaggcagaacggaatggtggtcattaccatgattgagaacttgggcgactcgaactgggccgccatgaccacgaataccaggaagatagccagggcaatggcctggaacagagccgtaaactcctctgtcatggattcatccatctggttctgggcaatggttacatttgcattatcacttacagccggctgcaccacctcgcttaaaagcagggcctttgtgtttttatccgaattctcggtatagataccgctaatagtggcgcggtactgcttatcctgcctggtgatggatgccgggctgtctgcaaagtgaatgtcagccacatctgtcagcgccacggagctgcccttgggcgtctgaagggtaattgtctcaatctgatccagggtcttatagcgctccttaggatactctacctttacatcaatatcatttccgtcaatattaagggaggtgggagtggtgccgctgagcatgttgttcagggtaccgccaatctgggccggcgtcagtcctgccgcccttgccttgatgggattcaccgtcaccttgacaactgaggccgcgttctccaggtcggaatggaccttggtcagctccggacgtttgcttaagttttctgccagctggtcgctgaccgccttcaggtcatcgtaatttgtactctgaaggtccacggagtattcatcatccgaacccatcatggcgctgacctgtgagtaggcttccactgttatattggtatcggagattccgcccagctgctgcttccagaggcggaccacctcatctgtctccatctttctgtccttcttaaggtaaacagtgatgttgggatccgagctcatgctcagtcctgaacttccggccagagtaatgtaggattccacatccccctgctgggagataatatcctctatctgcttcatgatatggtccactttatcaatggtcatacccggctttacttccgcggtaatggatatctggccctggtcatcctcagccatcatctccacacgcaggaacttggctatgaagaaggagaacagaaggagcgctacagatgccagcatgacaagtcccctcttgttcagaagctttgtcatgattcccctgtaggcttcctgcatcttttcaacaggtctggacaggggagctgtctttttctccaccggcttgtaaatcatatagcacagaggcaccaccgtgatagccgatataagggatgccgtcatacagaacacaatggtaaagcccagaggccggaacatctgccccgtcataccacccagcatggccagcggaaggaataccacacaggtggtcagcgtggaaccgataactgactggtacaccacgccggtaccgtttaaggccgccttggaaaattcccggaatcctgtgtcatccgtggccctgaaacagctctcaagcacaacagtggagttatccaccatcataccgacgcccagcaccagggcgctcagggtaataacattaaggctgaagcccatgagctgcatcagtatgagagacgacaggatggatacgggtatggagctgcctacaatcatagacgccttcaggtccccgaagaacagccaaatgatgaccatggaaatgataatggccagtaccattgtctcgataacagagctcagggacgacatgatggaatccttgtcatcatctactatggtaatctgcaggcttggatccttggcggtaagctcattcaccacccgctttacatcttttgagacattcagagtggcggcgtcctgctgcttgctgacagtcagggccacgatatcctcgggaagtccgttctcagccttataacgcgcaatactttccacatcatccgcgcccatatataccttggccacatcgctcaggtatacggtctggccaccggatacggtcagcggaatatcattgagactgtccatggtctcaaagggctgctcggttgacacagacagcttctggtcacccacctgcgtatctcctgccggatatgtgatatccgatcccgcaatatcgctggcaatagagctcatggatacgccgtactgtttcagcttctccggcatcagctccaccttgatgtatttctggagtccgccggtgatggaaacctcggctgctgttgacagcttctcaaattcagggacaatctcattgtttacataattgtacagatcgtcgtcctcaccatggctgaccgccatgattacatttggcttcaggctggtattcagctccagcatgatggggtcatccgcatcctcaggaagctctaccttagccaggtccatctgtttctttaaatcatcatacgcatcgttcatatccgtgccgtacttatatttcagcatgacgatggacatgttctcctttgactgggaggatatggtatccagaccgctcagggtactggccctgtcctcaatcggtttggtgaccagctcgctgacatcgtcagggctggcgccggagtaaacggtcattacaatcatcatggacatgttcatatccggcatcagctccagcggtgatttcatcaccgaggataagccgaacacaatcagacacaggattgcgagaaccgtactgaccggccttcttaagacaagttttgttaagcccattttcctgcctccttctattgtgcctgactctggtctgcggccggactttcagctttgtctgtctgatcggtttcctggatgacctgcatctttatctgggcatcggtttccgttccattcatctcaatggttgccggcgcctcgatctccagtgtcaccttggtcccctcctttaattcggaggtccaggtggtgaggatctggtcatccagggtgattcctgaaagcaccgcgatattctcactgtcatagatacccacttccacgggtacctcatggatgatgccgttgtcatatgtatatacgtaggcatcgcctgatttataatatacacagttatttggaatcagaatggcattcctggcagatgcagaaggcacccgcagctccacactggttccggccgccatggtctcattgtcatccacagacgcctttatcttgaacaggcccacggatgcctcagccatgttgctgacttcaatgacattgccgccgtattcggttccttccttgatgaccgtaatgggatcacccgggttcaggtggttctttaccttctcagtcacatagaaagtcacattattgccgctgtctcccgcgataacgcagagctggttggagtttccgactgtatcatgaacctccacattgagctgctccacccgtccgcttataggggatgttacatggctgaattccatctggttttcatatgcaatcttggcggactcatactgaagtctcttggcctcagcagcggtctgatatccctcaaactctttatcagatacaaaacctgaggcatggagcggagccatacgggccagggtagactgtgcgtcatcccatgccacctttgccgcgtccatggagtttttggatgtgtccacctgctttgtatcaatctccagcagcacctgtccggctgcaaccacatccccggccttcacgttgacagctgtcacgtcgcctcctgccttgggatatatgtatacaatgtcggccggctcaatggtgcctaccaggtctgttgtcagtaatatgtcgcccatatgcggcgtctgcaccgttaccaccggatccggggtagggacaacaggctcttccttcttgaaaactcgggcaatcacaatgactgctataattacaatcacgattccccagataatgcgcgtccttgcctttttcatcttctcctctttcctttcatgtcctttttagtatgagaatctgtcatagcaccggcgctgtccagtgatggaatacagcaccagaaaaaaacaagggaaatgagctgctttggtccacagcccttccccaaattacggcttccttcttttttaccaaccatcttgtattttagacagttgcccccctttttgtctaacaccaaaatgcggataattaacaacacattgttgttaattataattatttttcaaaaatttaataaaactttcaagtcttttctcattttctttacgccatacaatgatgacgctggcataggcctggttcctggagttgggcatagggtgcataaccaggcgttccccgtagttgtgataaaattctttaaagccgatatgaatcccttcattggcaataattgccagctccaggctgttgacattttcataataccgggccttctgaaggacgtgctcctgcttggcaatcagttcaaacagccgcagctcggcgccggcaaaaaaattcttgaagagacagagcatggtctctcccttaaaatcctccatgaccacatcttccttctgtgccaggggatttttcttggacatgacatagtataagggcagtttttttataaccatcaggccgcacttctctttaagctgctcgtaggaaggagtaaaacttaccgtcatcatcaaatccgggtttccgttggttatatcttttatattggtgaattcattgatttcaaattccacctccgggtcaaaggccatataatcagccagtatgttgcccgccatctctatgatgccgctcatgcccaccacagacagattaatcctgcgtttggctctctccccctcctccctggccatatccacggagtcatatatttccttggggatatccttccagcgccacagaagaagctcaccgctgcgggtcagcctcacatccctggtggtcctgtcaaaaagccgcagctccagttccttttccagagatgctatctggcggctcaacccctgctgggatatatacagatggttggctgcctccgtaaaattaagggtcctggctgcttccaggaaacattctatctgatggatggtcatggatatactccttttgtgtgcgttccagtattgttataagctgtccggcgtatcctgttttgctgcatcctgttctggtgtatcctgttttgctccgcccagattcagaaccgcggacggatccagggcgtctctcagggcatcgcccacaaaattgatggcaaccaccaggaccactatcaggagtccgggcggaatccagagccagggctgctttgtcagcacggtcagggactgggcgctgttgagcatattgcccaggctggctgtgggcggctgcacccccatgcccagaaagcttaaggaagcctcatccagcatggacaatgccatgaccgaggtggcgtacaccagaatgggcgcaacggtattgggaagtatctctgaaaacaggatatgtctggcaggcatcccggctactatgctgctcttgacaaaattagtctcccgcaggctcagcacattgcccctcaccagccgggcaatgccgggccagtccacaaatccgagaatcagtatgatgctccagagccccggttcaaagatggctgccgccaccagcaccagaagtatatacggaaaggacatgaccatgtctgtaaaacgcatgatggctatgtccagccagcctccaaagtatccccccagcagacccaggctgactccaatggcagtggatatggctgtagccagcacgcccaccagcagagaaatacgcgttgcatataataagcgggagaacatatcccgtccgatctggtctgttcccagcaggaaccccgggcccggcggggcgccaaagggtcctgcgatggcatccgggtcatagggcgctatgacaggcgccaggatggccgctgtgcagataactgccagcaccaccagactgatgcaggccagacggtggtggagaaaccgccgcctgacggtctgccagtaattttctcttccaatgtccccataagggttctttctgttcattttcattctatctatgcttactcctgtcaagtacttgcgccggtctgtcagtcatactgaatagccgggtttacaatggcgtacagaatatccgtcaccaggttggctgccagcaccaccacggcggaaagcaggcagacgcccatgattaccgggtaatcccggttcagaatggcgctcatggtcataagtcccagtccgggccaggaaaacagctgctccacaatgaccgcgccgccaaacagcaccggaatctgcatgccgataaccgtcacaatgggcaccagggcattgcgcagggcgtgcttatatatgaccatcctgcgcccgattcccttggccctggctgtgcgcagatagtcctgctggaggatttccagcatggcgctgcggatataccggatattggtacctgccatggagacagacagcaccagcacaggcatcaccatatgggccgccacatccgctgcgccgcccgcagttcccagggtggtcatgcctccggatggcagtatgcccagattcacggtaaacaggtacactaacagcagggacaggaaaaatcccggtatgctgcttccgaaaaaggaggctgtgaccacagcgtaatcccccttggaatactggtggatggcgctgtagatcccggcaggcaccgacatgataagacttactatcagcgacacccccatcagaaggagggttggtcccagatggcttccaatcatggcgctgaccgcctcgtaggatttcacggagtaccccatgtttccggaaagaagctgcccaagccagataaagtactgtatataaaagggtttgtccagtcccatggccgcctccttggcagcaatggcttcctgggaaatacgggctccctgaagcatttccaggggactgcccgcaaaacacatgatggcatagtcaatcatggtaatgccaagcagggtgggaatagcaatcagaatacgcttcagtatatattttgtcataccttcccgtcctccttctctaattccttaaaccggatacaggctgtcaggtggctgcttccgggaaccgccggcctcagctccatttccccgctcatgcactcccccttacagtgagggcatctggggtggaagggacatcctgaaggcgtatttacatttgacgcagtctccccgcccacaattccctctgaacgcttccttcgtttcctcggatcagcgatgggcaccgcctcgaacagagccctggaatacggatgaagagggtggtcaaacagctccttccggtccgcaatctctaccatcttccccaggtacatgacggcaatccggtcgctgacatagttcacagcccccagtccgtggccgataaagatgcaggtaagtcccagctccttctgtaaatccctgagcaggttcagtatctgggcctggatggacacatccagggcgctgaccggttcatcgcacaccagcagtctgggattcagggaaagggccctggcaatacctatgcgctgcctctgtccgccggagaattcatggggatatcttcccagacagttcttaggaagccccaccatatccagcagcctctccacatgggaatacacatccccgcgtttgaccagcccatgatacagcatgggctctgccagtatctcaaacacatgcttcctggggttcagggatgaataggaatcctggaatatcatctgcagctgggtgcggaagggcttcatctgggcctggctcatatggcccaggtcatgaccgtcgtagacaacccgtcctcctgtcggatgttccaaccctaccagctggcgtcccagcgtggatttaccgcagccggattcacccaccagccccagagtctccccctcaaacagctgaaaggaaaccccgtccacagcccgcaccacaccggcggaacgggagaacatgcccgactttgccgtataatattttttcagtccctccacagaaagcagggggacccgggatgtatcagccatctgccagcacctccttcgccctgcagcaccgcacaatgtgggagtcccccacagacatctcctgctgcggcttcatgcatatctctgtcctgaagggacatctcctggcaaaacggcaccctcgaatccggtcgtaatgctccggcacaatcccctctatggactccagtcttctgtcctcctcatccctgatgccgggtacagaacgcagcaatgctctggtgtagggatgggccggatggtcaaacagctccagcacccgggcctgctcaatgagctgccccgcatacatcactaacacccggtctgccatctgagccaccagtcccatgtcatgggtgatgagcagcaccgccatgcccatttcctccttaagctccagaatcaggtccatgatttgggcctgaatcgtcacatccagagccgtggtcggctcatcggcaatcagaagggacggattacaggaaagggccattgcaatcatgacgcgctggcgcatgcctcccgacagcaggtgcgggtattttttcatcacagatagggtgtccggcagccccaccttcttaagaagggacaacgctctctcccgggcctcatcttttcccagccccatgtgggcccggatgctttccgtcatctggctcccgatggtaaatactgggttcagggaagtaagagggtcctggaatatcatggtcagccggtctcccctgactccgtccaactcccgctccgtcatggagagcaaatcccttccctcaaacaggacccggccggccgtcaccttgcccccttttcccaaaagtcccatgacagacagggctgtgacgcttttgccgcagcccgactcccctacaatacagactatctcccccgaatccacatggaatcccacgtggtccacactgatattcttccccccgtcaccggaaaattcaacttccagatttgtgacttcaaggatatgtgacatattgtttcctcatttcttaatattaatggcccatttcccatgaatgaagatacccagagagcatatgccctccgggaatctgttcatacgttccgattatggggttgtcctgccgggatacattcaaatggaacatattctattgggatacaccccactgctccacatgattgaagaagccatagacgctgggcttaaccccggtcaggcgcttattggccgctgccatggtcttgataatgtaggctgaaaacatgggtacatcctcctggacgctccggtctacaatcccgtacagctccttcaacttgtccttgtcgtttgtcagggccacatttgacagggcttcctccacctccggcctggtatagccggtccagctgccctggccgcctaagagccaggcaacgtccgcgtaaggatccaccggaggatacgtatactgcacggacaacacatcaaaatcaccgctggaagcagtgctcatcagcgtattgatgtccatggtctggatatctgccttgatgcccaccgcggcccactgggctgctataacagaagcagcgttcacaaaggtactgtcgcctgagtcaatgcagaaacggatgcttttgctctggtcccatccgctctgtgccagcaggctctttgccttttccggatcataggaaacaggcaccagggtactgtcaaaatacgggctggctgatgacaggaaaccgtccgccacttctccgtttccctttaagagctgctccagaagctggttccggtccactgcgtacagcatggcctgacgcacctttgtatcggtgattctggctgtattgatgaatacggactggttggtaatggggtctccgtaggaaacctccacgttctccagcgccgccacactctcatagtcctccaggggaatggtactcatggtgttctgggtaatgtcgatttccccggacttaagcccggcataaagctggctgccttccacgatttttatgttgaggcgctcaatcttgggagcacccttccagtagtctttgttggcctcataagacacatagtggtcccgatcaaactctgtcaccttatagggaccgctcaccacgtccgggcggctaaaccatggggctgacgtcagcgccttctcatctatatccccaatcacatgctttggaaggggcatgagatagcgggcataagaactgttaaaggttatgagcgacatgggtgccttggtggtaaaacgcacggtcttatcatccaccctggtaatgccttccacatggtctgccccttcttctacaaacccgttgtcgcccacgccttcaaatacataatacatcatagccgggtttccgatgaccgggctgcacagcctgagagccgtgtacaccacgtcgtccgcagtgaccggagtcccgtcggaccatacggccttatcatcaatgtgcaccaggaaatttctctcgtcctcagctgtcacggaatcagccagcattccctcaaattccatgttctggtccagttccaccaggggcaggaacataagacctgttgcatatttattcatctccacgccgtccatcagcaggggattcagcgtattgagagagctggtcactccgatattgacaatcttcccgctgccagcggccgctgactgggtctggcccgctgctgcctggcctgattccgcctggcccgacggctggctgccgcccttgcccgcacatcctgccgatgacaggaccatggccgcagataaagccagggccagaaatctgcctgcccttctccctgctgttccttttgtatgtttcataagtttcctccttaaaaccggcatccgtctctgcacagcgctgcgccgtgcagcaaaaccacactattcatagcaaattagtatggttttatttatatcattacacgcaaaaaatgtcaatagctctgtccccccggcttttaaaataaagtggaaatttactccatactgctatagaatagggttaaaaggagtaagcttctcccctcccttgttcctccgtccactctgcgttacctgctaagcagggaggctgctcctgtcctttgtaaaatccgtgaggcaaaagatgtaatacactactgatttttcttttgatccatgcctcattgtggtacaatgccttattatagacaaaactctcaatgaggtaacggaggtatgcttatggatatgaacctgatgctgattatcgtacaggagaatgatgctgaatcactggcatccgcatttaagagaagccagattcaggccaccaggatagacgccaaagggctggtttccagcaggaaacttaatgtattcctggttgggacggaacggacggacgaagtattgcagctggtgtcttccaactgcaaagaacgcgccatggagatagaggaccaggaatacaatggccatatgtttgtggatgtacagaaaaccatcgtcattggcggcgctaccatcttcatcctgggggaggccaggctgatgaaggtcaagggcggatgctgcggggattaagggcagccggaaaacataaggcaaaaaacacaaacgcaaaaacgggactccatacatcacatatggaatcccgttatcattttacccatcaatccctgctgaacaaagaattaatcgcaggtatatggcataagagcgatatgacgtgcgcgcttgatagctacagtcagggctctctggtgctttgcacagttgcctgtgatacggcggggaaggatttttcctctctcggatacgtatctctttaacttgttaacatccttataatcaatggttccgttcttatctccacagaatacacaaactttttttcttctgcgcattccgcctggtcttctcatcttagcgccatctggtctgtctgttttattaaatgccattggtgttgtcctcctttattattaaccatggaacatcctagttaaatggaagtccttcgtcctccactccatcaggaatgttcataaacccatcaccaatcgcactggtaggagccggtctctgagaaggagctgcctgggcatatcctcccatttcagacgccgcacccttactgtctgcgaattcctggtcatccaaaatgacctcggtggtgtatactttctgaccttccttatttacatagctacctgtctggattctgcctgacacaagcacccgcattccctgacggaaatacttctcggcgaactcggcagcgcggtcaaatgcaacacagttgataaaatcggctgtctgctgctccgcggagctgtcctggcccctgcgtccccttctgtccactgcaagagtgtacctggctatagccatggaacgctctccctgtgaatatctgacttccgggtctcttgtcaatcttcccattaagataactctgttcatacggtcacacttcctttttctctcccgccataggcggtctgggtatcccttatgcctctgccttaacgcataagtatctgatcactggttccataatacgaatgtgagcctctacttcattcgggcatacagaatcagactcgaactggatgaagtagtagtaagcttcgtgcatcttctgaatttcataagcaagtctcttcttgccccattcatctacatttgttacagtgccgccgaaacgggtaatgtaaccctttaccttttcgattgctgctgcacgctgctcgtcttccagcttcacattcagaacaacggttaattcatacttgttcatcttgctttacctccttgtggtctctggcccctgctttcagtaacaggagcaaggatataatatgtcacggagtattattttaacaaattccctggacaaatgcaagatgtttttttgttttctttcatttttatgacggatttcgcggtatctccagggggcggctgcttaggaatcctcttttgccttggtaagtcctctggtatttttctccaccagcctgcgggcaatcatgatttgatgtccgcaccccatgcatttaagccggaaatcagctcccaccctgaggatttcccactggctgctgccgcagggatgggtctttttgagctttactatgtcccctacttcataattcaacttttcattcatgccatatctccatttctgtatatgggtctggccgctgcctgtcaccctttcagtatgccttctatgtcagccagctcttcacagctgaatgccgggctgtcaagggcctttgcgttatcctccagctgggcaatactgctggcccctatgagaacgctggtgacttccttcctgcgaagtacccaggccagggccatctgggccagggactgtccgcgctcccctgccattttgttcagagccctgatttttaccagcttgtcctctgtcagatatctgccgcccacagtggtcccttcctttgaagccctggatccttccggtatcccatccagatatctgcccgtcagggcgccctgtgccagggggctgtagcatatgcagcccacgccctcacggtccagaagctcgaaaaggccgtcctccgcccagcgctcgaacatattgtaccgaggctggtgaagcagacaggggattttgttctccctcagtatgcggatggctgcctctgcttcctctgcctgataattggaaatccccacatacagcgcttttccctggcgcaccatgtctgacagggcacccatggtctcctccaggggtgtctcagggtcaggacggtgatggtaaaatacatccacgtactccagtcccatacgctttaggctggaatccagactggccataaggtacttcctcgatccccagttgccgtatggtcccggccagaaatcaaaccctgcctttgtggagataaacagctcatccctgtaccttcccagaccgtcccggagagcggaaccaaaattttcctccgcctttcccaccgccggaaatccatagttatttgccaggtcaaaatgggtgatacccatatcaaatgccctgaaaagaacagcctcctgttcctccaggctcttttccagtccaaaattctgccacagtcccagggatattcttggaagcaggacaccgcttctgccgctgcgtttatattccatgctgccgtatctgttctctgccgcctgatacatctgtgataccttcctttcctaatcaaccacagtcccaaggacctctccaatcggatcgctgataaccagatccgcctgggaatcccttgaggtggccgctttattgatgagcaccagtttattgcctctgtagtagtcaatcagtcctgccgcaggatacaccaccagggatgtccctcctatgatgagtatgtccgcatgtctgatatagtccacggatttctgcagtgtcctgtcatccagcccttcctcatacaggaccacgtcgggtttaatcacaccgccgcagctgcaatgaggcacgccatcgctctttacaacgtagtccagatcataaaactgtccgcatctggtacagtaattcctatgtacactgccgtgaagctccagcacctccctgcttcccgccatctggtggaggccgtcaatgttctgggtaatgaccgccttaagcttccccctctcctccagccgggccagggccttgtgggcctggtttgggacagcatcggtaaacagcatcctgtccttataaaatcggtagaattcctccggataccgcatataaaagctatggcttatgatggtctcaggcgggtacttatactgctggttatagagcccgtccacactgcggaaatccggaatcccgctttccgtggatactccggctccgccaaagaacacaatgttatcactgccgccaatccattcctttaactgctgccatttttcgttcataacattaccccttcctgcctctgcaacccatgccttatctatagacttatctataagccttatcttgcagccttatctatagccttatctacaccacctcatccagatacacgccgtccaggacctgcacatatgcgcaccagaaaggcactccattttgttccccctctgccagctcctccagggcgctgtatccaaacagccaggatgccagctgttctatggtaatatccaaaacctctgtggaaaccagcgtccccggataatccggctcctctgcgcattccccggtatgaatctttggcagggatacccctttctttgtaagggaggatccgtttccgtcaattttccatctccacaaaccgctgttgcccggtatcagcgggtcatggatattgaccatcacatccatggcaggacagggacacccttcatccaggacaatggcctccataaaggagcgcacatcggtaatgcgggccatgattgccggtctgggcgcatgctggccgctgtccggttccagccatctgtccctgcccgcatacaggaacctctgctcctgcttctcacgcccccaaaaggcctggaacgcctgcaatgaccccgacacatcataccatccatatacgcttcccgcctcgctgtctaactctgactgaagcatctccatataatcccggtcgcgcagcgcatagacctggtacctggaggagagccagtggttcatccatccggccagcgaggaacagagatttccgtccagccgaagttcccgcctctgaaggcattcctttgcctcagatcccagtctgtactgaggctggtcaaatatataccggaacccaaagggcctgtagatatccggcgaggccggcatgagatagcagaagggcttcctgtcctgatgcatgtcccccagcatcttcatgagcacatccctcatatgtccgcggtggcggctgtcggcagccgtagccacgccaacgatataatccagcttccacatcttctttcccacattgatcctgtatgggttcatatgggccatggtgacgatacggcctgtgccgtcctccttcactagtacggagctctgtagtatttttttatcaaaataatagtctgcaaattcccgggaatcctccggaaacgcttcctgccaaaggggcctgcacgccccgaactcacttttctccaaataccggatcatcgttccctcaccatatattttcttgcaaatccaatgggacaataactcatcttggcctttctcagtccctccatgcccacatcgtcctccctgttcaccagttcagcctcaggaaattcattgattaggaactgctggttgataaactggtacagacctctgatttcagggttggccttctcaatatgaatgacagccatattctcacgcacattcaggcttccaatggtaaacgcctccagctggccgtcgatatataccccggccatcctcacgtagaggctggaacaatttttaagtatatcgtggatccctgccacctcataatccagggacagctccatggcgcccacttcctccttgtgctgcctccagcgctccataaactgccacacctcatgacggtcggagcagcacagacgcctgtactcataccggccttcataggtgcgcttaaagccgttcaggtggtttctcttcttgacaaacttctttccctccagctttctcagctcctcgccgctgtagaggtagtcctttaaatccacctgttcctccacctcaaaaagggccggatccaggttcaggcactgtaccgcttcctcatcggccagggagatataaaaaggcttgtgaagcacacccgaaaaataatccaccatctgctgaaaaaagtaaggcaggtcctcctccctgcacagaggcatggccgtggaaacctggccgtccttttccataagccacaaaacagctcttccctcgctcaccgcgcactgtacatgataatagtccttccacaaaaaactgtccagaaacacactgtcacatgttttattgggcctcagcccgtaaaaaggccgaagcctgtctatatccccggccaccaccggcttaaattccaattccatagcatagcaccttcttttcatttaacttctgatagtataccataaaaccgggttctataacagtttttttgcatcacaggaaaaagacctggaagccgtcttgtttccagatctctttcactttccggacctcatttttccaaagccgccggcctcttccggcaggaacctcccttacagtccctgggcaatctctttcaccagcagcagcctctgccccggtttcacctggtcgtccgccagttcgttggtggatatgatattgcccactgttgtatggaatttttttgcgatttcccacaggctgtctcccggctgtacgatgtatcccacgattcccggcagctcctggagcttctgcagatccatgggatggatggctgcccctgtaatcaccggttcgcacaccggctgcagaaccagaaagtccagggcaatcactgccttcacttccaccatgtccccgcccatcatcacggcgctgagctgttccagccctgcatccagctggtacacgctgtcctcccggattcctctggcctccgccacgcagtggaagggcacctgctccacagaggactggaccggtgacgtgtcatcgctggtgagatataaaagggtcacttccagcacaccgtcaatctccaggcagtcatccccgatttccacctcatccagtttgatggtcccctcgttgtggcaaatctggaggatccgctcagcctggggcagactcagcttctctgccaccttggatttgcacacattcctggtcagtatctggtcaaaacaggcgtctgaacggttcagctctatctcccggttgttggagtacatatcgcttaaaagctcgacctcctcctcctcgtagagcttgatatccagctccagcaccgcgtccacatccatttcccgcatttccccgtcgtaatcaggcttggcttccatgtccttatgggccaggcgcactgtcaccatggggatttggtcctccttcacatcacccatttccatgtcccctgaaaatggtatggtctcctccagccactggacaggcatattttcatcctctgccccgtaaataacaaaaacactgagttcgccgtccagatggagccttccgtccagtggtttagcggtcacgtcccgcagcttcatttcccgccatagtagctggcctatgttgggcttgcctccggtaaggctcaattcctccttaatccggtatgtatccttgcgcctgacagcaatggcagccgcgttggccgtgcgcttaagcgtctccacctgcacctgtcccgctccgtccgtgtcagatatgccggcccctgcgggacggctattattttccatgtccacatccacagcagcttccacgtccctcagggtctccacccgcacctgaagggtaatgatggcctggactcccagcttcctggaattaatcatatccgtgttcaggtcttccaacatccagttaagccccacgtaatccttttcctccaggccctggacattgaccacctcctcaaagggaatattgccgcccagggtctggagcccgccactctccttgcggtacagcacctggaattccagcttcccctttaccgccaccttatccccctggttcttcactgtctcaatctgtatttcgccggtgtccagcatgacctgctccatatcatccagggtatccggtacaataaagtcatcgtccagggtaatctgcgtggtcacgttgcccttccattggttcatatgtatctgcttctttatcaattccataaaaaacacctgccatctctcatagtcttttagaaaaatctatgcggacagcaggtgatttatgctctttttctatctttcatcgtattcgtccataaagtggcggcgcaccccgtccttcacatagccaaggcaggcatccaggttgatgttctccacgcttttcatgatattggcgtctatgaaggggctggtctttctgagggagcggataagctctttcatctcctggcgcttggaggtgtgcacgatatcagccgcctcccctgccatgccccttgcagcctgttcctttgcaatccgctccgtaaaccggcaggcacactggaggaaatgcagactgttgtaatccttccagttcagtatatcctcttcctttacatagtacaggggacggattaattccatgccctggaaattcgtgctgtgaagcttgggcatcatggtattaatctggcctccgtaaaggattcccataagaatagtctcaatcacatcgtcaaaatgatgtcccagcgctatcttattgcaccccagttccctggcatgggcgtacagataccctcttctcattctggcgcaaaggtagcagggggactgctccacgtccaccacaatgtcaaatatatccgagtcaaagatgcgcaccggtatattcataagggctgcattatcttcaatcagcttcctgttgtccggattgtatccgggatccatgacaatgaactccagctcaaaatccgtccggctctgccgctttaactgctggaggcatttggccagaagcatggaatcctttccgccggatatacagacagccaccttgtcgccgtcctttatcatctcataatcctgaagccccttcacaaaggggcgccatatttccttgcggaactgttttatgatgctccgctctatatttacatggggtgcttcctgtttcatttgccgtgtatcttctcctgggtaggttatttttcagaccgggcctcttttaaggcgcccttaaggaaatcaatctccttctccatctgttccatccgccgtttcattgtctcgtattcctccagcgtcaggcttttcttttcctttggtatggtaaccccatcctttttgattggacgggcaggtatgcccacggcggtcacattgtcctccagcggcttcagcaaaactgcattggctgcaatggagcagttatcccccacctcaaaggcgcccagaatcttggcgcctgctcctaccatcacattgttgcccagggtgggatggcgtttgcccttcttggttcccacgccgcccagggtaaccccctggtaaatggtgcagttatcgcccaccactgcggtctctccgataaccactccgcatccatggtcaatcaggatgccccggcccagccgggcgccgggatgaatctcgataagggtgaaaaaacgggcaatctgtgaaatcagcctggccacaaaaaacatcctgtgattatagaaccagtgggcaaaccggtgccatataagggcgtggattccctggtacagaagaaatacctccagggcgttgcgggcagcggggtcacgttcctgtacggcctttatgtcaagccatatgtccttgaatatcatatttactccagcctttctttaacaagttaatacaacgctacggtaatacgacattttcctaaaaagattaaatatcgtatagtatagcatatgatattcaaattaaaaagagctttttacagtttgcgccctgtttcatacctcttttcaggcttttgcctccccccggcccggttatgctactggaataccacaggattttccagatactctgtcctgattacaatatatggaaaagactgttccgcaccggcattctcccccttttctgggcccttaagctccgtattgaccacaatagagttgtcggtcagatagagctcattgacgctgatgctgtagccgcctgtgggctgtacgccgtatcccaccgctatgtacagattctgttcatcactgtatgtgagcttaaacggctgctgctgtttttcagcaatcagattcttaagctcatccggcacatccatatcgcctgccactgtgaaatccaggtccctgaccttatccccgctgtcctttgacgcggagcagccggccagccacagggtcatggcaaacagcatcatgagcccaaggtacactttacccttaatagttcctttcatgttaaaacctcccggaatatatgatacaattactatcaatatattccgggaggccctgattatgcgtttaaacacatgtttgcgtatattctgactttataatagtcaaaccgatattatatggtgttatacgattttgcggatccatccctcaggcgcttcgatggttcccatctgaatgcctgtaagggtatcatacagcttcttggtaacaggtcccatggcgtccatgccgcttgggaagcagatttcccttccgtggtccacaatcctgcccaccggagagataacggctgctgttccgcacagtccgcactctgcgaactcatccagttcagaaagcttcacaggcctctgggttaccttaaggcccagataatgctctgccacgtacacaagagagcgtcttgtgatggatggaaggatggaatcagacttaggtgtcaccacctcgccgtccttggtgacaaacaggaaattggctccgcccgtctcctcaatataggttctggtaccgggatccaggaacacgttctcatcatatccggcggcatgggccgtgacagacgcgtgaaggctcatggcgtagttcagtccggcctttacgtggcctgtaccgttgggcgctgcccggtcaaaatcgctgacgcaaagagtcagaggtttggctccgtccttaaagtaagggcctacaggcgttccaaaaagcctgaactggtactcctgggagggcttaacgccaatgacagggcctgtggcaaacatatagggcctgaggtagagggtggctccgcttccgaatggaggtacccaggctgcattggccttcaccacctggtccactgcctccaggaatcgctccttcgggaagggcggcatctccagcctcctggccgaatccatcatacgctccgcgttcagatcagggcggaacgtgacaatgcttccatcctcagtggtataagccttaagtccttcaaaaatctcctggcagtactgaaggatgcccgcgcattcattaatcaccacattggggtcagaggtcatcccgccctcgtcccatgctccgtctttataattcgccacatagcgcttgtccgtcggcatataggaaaatccgatatttccccagtccaggtctttcttttccatagtctgttcctccattcgggtagatataagatgtattttgaacacaattataatcgtattaatcctcaaaatcaatgggttccttgcaaatatactatacaattcctgcatatcagccataacctcagccggaattcatacatgcaaaaacactctcaggccgcattgcgaatcccgcaaaactgtgttaagttataaaataggaataaaccaacacaaggagatgtacatacatggccaagaaaaatgcccgcaacacccgcggaaagattgtaaatgcagcatggcagctgttctatgaacagggctatgaagataccacagtggaggaaatcatagaactctcccatacatccaagggatccttttaccactatttcgacggaaaggatgctcttttgagcacgctgagcctgctctttgatgaaaaatacgaagaactcatggatacccttacaccggagatgtcggccatggacaaacttctctttctaaacagcgagctcttcggcatgattgaaaacagcatatccctggacctgctggcccgcctgctctccacccagctggtaaccagcggtgaaaagcacctgctggaccacaaccgcacctactataagctgctccgcagaatcatcgcccagggccaggaatccggcgagctgaatgccgaaaccagtgtcaatgagatggtcaagctttacgccctgtcagaacgcgccctgttatacgactggtgtctgtgcgccggcgaatactccctgcgcaggtacagcgcctcagtcatgcctgcgttcctgagccatttcctgccgcggcggggatgattgcaggggaccggagatgaagcctttatatgtataaaaaatttttcttatatatttttcaattatcgtctagtctattttcattataaatacgttgttttatttatattttttaataattagtctagtatgtagtctatacttcgttctgtattgcgttccccttaaccccatgctataatgtcagcattatgtccgttttccgcaaaggaacgcataacaggagggtaaaaatgagtactggacaaataggaatcctggcagccatcatcgtgtatctggcagccatggtatatgtaggtttttatttcagcaaaaagggcggcggtgattctgccgacgaattctatctgggaggccgcaaacttggggcgctggtaaccgccatgagcgccgaagcttcggatatgagcagctggcttctcatgggtctgccgggagttgcatacctgaccggcatcgcggatgcaggctggaccgccattggtctggctgttggtacatatctcaactggctgattgttgccaagcgcctgcgccgctattccgtagcgtgcggggccattaccataccggactttttctcccgccgttaccgggatgacaggaacatactgatgtgtattgccgccatcgtaattctgattttctttattccctacaccgcctccggattcaaggcagtgggaaccctgttcaacagcctgttcggcgtgaactatcacgctgcaatgatagcaggcgcagtggttattatcggttacacggtcatgggaggctttatggcagtatccaccacggacctgattcagagcatcgtcatgagcattgcgctggttatcattgtattcttcggcatccatgtagccggcggctgggacgccgtgacagacaacgcccgttccctggcaggatacctgagcatgacccatgtccacaacatggctgacaacacagcatccccctatggcttcataaccatactgtccaccctggcatggggattagggtattttggaatgccccatatccttctgcgcttcatggccatcagccatgaggataagcttaagacgtcgcggcggattgcgtccatctgggttgtcatctccatgtttgtggccatcctgatcggcatcatcggatacggcgcctctgtggcaggcgggatccccatgttttcatccagctctgaatccgagaccgttatcatccgtctggcggatttgctgggacgccacggaatcctgctgtctgttgtggccggagtggttctggcaggaatcctggcctgtaccatgtccacggctgactcccagctgctgacagccgcctcaggcgtatcccagaacctgctccaggatttcctgaagattaaaatggatacaaaagcgtccatgacagctgcccgtcttaccgtagtgggcattgccctggtagccatcctgctggcctggaatccggacagctccgtatttaccatcgtatcctttgcctgggccggtttcggcgcgtcctttggcccggtgatgctctttgccctgttctggaaacgcagcaatctgaacggcgccctggcaggcatgatttgcggaggtgtcatggtatttgtgtggaaatacggcgtgcgccccttaggcggcgcctggaacatctatgaactgcttcccgccttcatcgtggcctgcattgccattgtggccgtgtcgctgatgacagaagcgccatccaaagaaatctgtgatgaatacgattctgtgggaagataggattgaatgaaataccaaaaccgcaattttcagataagactgtttccatctgaaaactgcggttttctcttttcctattgctctctcatctgcggcttatcggcccggtgccggcttctctcccgtactttcttagtcctcctgcttgctgcagattgccagcctgtgctggtacttctccctggtagccagccctccccggatatggcgctctgacttattcacatccagcacgattctggcctgggccgccaaggtgggattgatgtgctcaagcctgtcagttacatccttatgtaccgtggatttgcttattccaaacttcttcgccgtctgccttaccgtggcattgtggtctatgatgtaattggcgatggctaccgcacgttcttcaatatactccttcaaaatgagtctcctgaggatttttttacatcatatgcagaaaatcccgggattagcacaccctgtacgttttccggaaggaatattttccgtccgtgcatgtccgcctcaggcggactgtcctgtgccggccggcagagtgcagcttttaaatatattccagcacgccacgtatatccgtgaccactgcgtccgcgccggcttccaagtacatctgccttaccttccggctgcgttcttccttttcctttggggaaagcgccttaaattcctccctggacagtcccatggcagaacttccctcaattactccaactgtaaacagccctgcatttttaccttctctgatatctgataccgtatcgcccactttcatgacccgtcttacatccgtgagccccagaaactgcatgtttctgaatatcatatagggattgggtctgcccttgcggtccacggagtccgggctgaaccagcagtccggcttatatccctttgttgctgcggccgcggcaacaatctccatcatctcatcggtatagccggttgtggagccgatttttattcccatcccccgaagcgtttccacggtttcagttacatagggctttacatctgtaaacctgggaacgttctccagaattttcttctcgcttaactgatacacctggtacacatcctcttctgtaaacggacggccgtatatccgttcccactccgctgtaaggcgctccatctgaagcatggtgcgcacatggtcaattttcagcattcccataggagccctgacctcgtccatggtgggaacaattccaaattcctcaaacgcatccatgaatgcctggaccggcgcaaaacatccatagtccaccgtggtgcctgcccagtcaaatatcaccgcatcaaaggctgtatggcttttttcacgcttttgtatctttttgttcaggaactcaccaatgattgcacacagcctgcggatatcttcctcgtagatttccccaatattgccgattcggaacgtatccgcatccgtcacctttcccggataaatggcatatccccgctccttgatatagtgatacatctcgtcaaaagaaaacgcatggttttcagggtagaagaaggtggtaatgattggtccctgatgccggctgtcaatataaggacgaatccccatctcagccatcagctcaatcagcagcctgttattggaagtatagcgctgatgtctggcctcaattccgccctctgcttccatctcccgcattgcctgggcaaatgccagaaccacatgggttggggaggtaaaacgccatttcccgtccttctccattgtcttccactggtcatataaatccagggacaggcttttagcctttccctcacatgcagccaggcagtcccgcctgcaaatgataaaggaaaatcccggaacaccctggatgcatttgtttgcgctgcttatgataaaatcaattcccagctcttccgccgggatatccacgccgccgaagctggacatggcgtccacgataaaagtgcgccctgacgcctttaccacgcctgccacagaagcaatgtcattcaggattcccgatgtggtctcactgtgtaccatggaaacatgggtaatctccggatgctcattgagcagcttctgaattttatccgcggacggaacctggtcataggtctcgctgtaaagaatataagaaagaccggcatgttctgctatatccgccatacgttctccatacgcaccgtttgaggcaatcagcagcctgtcatccgcccccacagagctggtaagcacagactccaccccaaacgtaccgctgccctgcatcagcacgcaggtataggtatcttcagaaacgcgggccagcttaagcagccctgagcggatttcctgggtaatctttttgtaatcctcatcccaggtgcagtggtcaaacatcatctctttttttacagtgtccgtagtggtcagcggacccggggtcaacagtttataattcggcatacctaattttctccttgtcttatctttctctatttttaatgcttcactttatttcccgcagcctctcttagcagcctttttgccggaggattttttccctatttgcagctttcagacagctcctgatgctttttcagcaagtccacggtcagcttttccggaaacaccctgggataagcggactggttctttgaattgctggtttcaccctcatagattggaaggggataggtggtcagcagctcctgacggccgtttttgataatacactccgccatttccatggccagcttatttgtcttatctcccttgtcaatgacagccgcggactcagtcagagaaaaatttccctcggtgggatccacataatcaacaggaagcccttctgccttatccgcaactgcctggtgacgcaggccgaaaccgacggccacctcgccggcacgtacttttttcaggggtgcagagcccgagctttcaatatgggggcctgcattttgatagattccgctgagaacctcctttgccccgtcctctccgtattcgctgacaatggcctgcattaaaagccacgcagtggaagaactctttatatctgtaacggaaatcaaatcagcgtacgcgggatttaccagatctttaatactggacggcgttggaagctgatgttccttcatcatctcagtgttaagaataatagctccctcctgtctggtaaccgggctgtagtaggccggatatttctccaggggttttgcgtcaaaagtcaaatcaaggaacatgtgattctgttcctgggcgctctccagatagaaggaactcatggtcaccaggtcagcctcgatatccgtcccttctgccagcaatttgcctcccagctccgaggtgccaaaggtctggaataaatattttcccccgtatccgtttccgtccagagcatgcttcattgcctccacggcttcgtcatctgcgttggagtagataatgacctgggcttctttcttttgacagccggttacggcggcagcggcagccagaacagcggccagacatcccatgacagcagcttttttccaattcttcatgattgtttttctccttttgtttttgcagcggcctcctgccagatatccgaacagtccctttgccgccaggttcgttatgagaatcagcagtgacagcacaaaaatctcattaaactttgtgtaatactgcagttccttaattttcgtggtaatgaccatggtcctggctcctgctatgaaaataacagcgctgacagtcaccatggcattgacaaaataatagctgaacacttccagaagggtgcttaccgcattgggcgtcaccacgcggacaatggtcttaagccagctgtcccccattaaaagggctgtggtctcccaggacgcattcatctttgccagggagctcttcatcatcagatagggggtggaaaagaaatgcaccacattacaaatcactatgatgaaaaaggtattctgaatgggcgtcccggaaaatgtaaataaaaatgcaataccgattaccatgcccggaatggtgttcgtgaccagggcaatgctctcaatgacagatttaagccggctgcttaactggctgcgggccgtggccagcgcagctgcgtatgccaccagtgaaccggtgagcgccgtacaaatggataccaggatggagttcttatacacagaaagcagtctggaatccgtaaacacagtttttatatgctccgtggtaaactgcctcctgtagggccattcctccaccataggcactacgaaaattaccgcaaatatacacagtaccgaagccagaatgagtacggacgccgccccgcagcatatgtcgcggattctcccctttctcagctctatgccggagaccttgctgtagcgtatattaaaccgttccagaaactggagcagggaaatgctcaccaccgacggaaccagcataaacatagccaccacagcccctctgttaaaatccggtacactacccagcatttcattgtagagcactgttgccaccacatcatactgtccgcctacagaagccggtatcccaaaatccgtaaaacacagaaaaaagcattgaacgaaggaagcggccagggtgccgagcagaggcctgataactgttcccaaaaaagtctttaacgggctgtcccccataatccttgagacaatcatgaacttcttatcaataaaactcatggtgttcagtatcagcataaatgagataggcagcgtgtagataacatatcccagaagcagtccgcaaaagccgtaaatctcaaacatctgatgccctatcattcctgtgataaacccctgcctgccaaaggaatagataatggcaaatccgtatgtaatggtgggaagaagcatgggtaccactgccgccaggcgtatgaatttttttaggccttccggcacattggtataatgtatggtataggccagcacaaaagccaacgctgtggtcagcactgcactgacacaggatacaaagatgctccggccaaaggcagccgcaaatccctttcctcccgccacatccgcgtagtgctcaaggctgatgctgcctcctccttcaaaggattttcccagaagcagtacaatgggaatcagaagaaataccaggaaaacaatgactaccattgcgtaaatctgtttgagctccctctctttagtctttatcatagatttctttgtcctcacgctttcatgctgtgcagctgattctctgactgctgctccgtgtcatttcccggctgaacagagtgaaaatattatttctcttcacctcaagctgatttaaaatgaaattcttaacaaagctgtctgcgggctgtcctatgatttcctccggcctgccgaactgggcaatgttcccctcattgacaatcagcaccttgtccgacaaggtcagcgcctcctccgggtcatgggttacaataatggttgtcagcttaaactccctggcaatttccttgatcttctccttgatagactctttaatcacaccgtccagagcgcttaacggctcatctaacaggagtatcctgggcttcatcaccatggttctggccagggccacacgctgcttctggccgccggagagctggtcaattcccttggccagatgttcccccagccccagaagatcaatgagttcctgcacctcctgtccggtggaaatgtcaggtttgttccgcagtccgtaggtaatatttttatatacatttaaattagggaacagtgcgtaatcctgaaacacaatgttgaatccccgttcctccatgggaacccgggtgatgttgcggccttcaaaccatatttcaccgctgtctgcatctgtaatacccagaatcaggttaagaagcgttgtcttgccgcagccggatggtcccagaatggacagaatttctccactctcaatagacaggctgatgttatctaaaattgtaaccccatcgtaagatttcctgattttgttcagttccagcatataatatgctcctttcaaaaattgccccttgctgtaattgtgccgttactcgtttgtccctaacggacagtcaaattaaaacacaacggcagacgtaaactcaacaaaattcctgtaattcttgtgtaaagccagtgtaaacccgttctggcgcaaaaaaagaaggcttgtagattttctacaaaccttctgtccgcccggcactgcctgatggagcagcagacccgctctagtacgtctggttccgcacaatacggctgctttcgtccagctttttggtgtattttggatagtcccggagaatgatccccgtgtaaatcatatctaccaccgcaatctgggatgtcctggagaaaatggcattgccgtagagctgctgccggttgccggtgcacaacatgatatccgcatattttccaatcagcacatcatcgtaattcgtcagcacaatggtggaagctcccttccgctttgcaagcttcatcacatccactgtgctctttgatgtacctgagtacgaaataccgattgccacatcctgctccccaaggtttcctgcgctgatctgctgaagatagacgtcgttataggtcacacagttaatccccagatacagaagcttagtcaccaggtcattggcaaccgtggctgagttttccacataatatacagccacctggccggcgctgcaaatcatcccggcggctttgatgatttccgaaggtgaaatatgtttaagcgcatcgtccagataggaaatcgtcctggtaatcacctggcccggaacctcctccggcctgtcctcctctgatatgccataaccgcagaccagaggcggcggcacagcccctcctgacccgtccgcccggctgtccgcctttgcatccgcttccatattgcctctgccggaggctgccttcagcaccgcatacttaaattcccggaagcccccgaaacccagggccttcacaaatctcatgaccgtgggctggctgactcccgctgcctttgccatgggaaccagggaaagctcctccaactgtcccgcatatcccagataatagtccgccaccttctgttccgaaggccgtaaatccgcatatagcttctttatattaaattcaaacggtttcgccatgtcccatacctcggtttccagattctccggtcttcagtttcagactcttcggatgcaaataccaatgctctcatgccatacatacacaggatatacgcggtactttttctacaaatatccggttctgcacgtttctgccaatatgtcaattcagcttcccacagataaaatcctctgtccggcaaattgcatttttttcaatacaatgctgttccggcacgatttccctgccaaaacagcattctgtttctgatatatgaagtcctctgtactccctattatagcttatctttgtctcccgcaccacaaaaattgtacttcagccaggaaaccgggggccaatgcatgatttaccccaacaatatctccaccgcctccttaagcgtctccacttcccccacattaccggggaatatgatataaggcgttcccggaaaacggctctccggacctgtgcgccataccggtatgccggggcggatctgtcccaggaccgctgcacgctttacctgcaaagccttggttcccacatcgctggaggtgatgccgcccttagccaccacaaatgccggcctcaccttcagcctgcccaccagtgactggactgcgtcggaaatcctgaccgaccgcaccaatgcctcctcaggactgtcatgttccagggacagcagcttcctcctggtatatacggcaaccgtcaccccacggccaatcagctcctcttcctggcttataacagaactgatttcctcctggaacttttcctcgtccaggaccaaatcggaattaaactcaatgaacctgattccctcaacggtttttaaagcctccagctggctggttgttttttttgtatgggatcccaccactatgattccgcctgtaccgcagttttcctgcaccatctcttccctggacagaaggggtctctcacggatggccccgaattccttcacaaagcctgcggctgtgcggaacataaacctgcgcccctggttcatggcgtcataaagggcaatgcagaacaccttcaggtcgcaggcatccactgcgttcaccacgattttcccaaaatcatggagcgccagcagtttatctgtaatggcggcataatccaggctgcgaagctcctccagggaaacatccagcacttcccgggccggatatcttccccctgtcttttcctccacatattcctttagattggagcaatggtacccaaaggtcttatcctctgcaaattctgtctccccggcaggtatcagctcatttccatactttacatagtgcacattgccgatggtaaaacgcccgccctccttaaaatagggacaaataatttccccgtcaacagcccggcccctgtgcttttcctctgcccgggccagcagctctgtctccagggggtaatgtcccctcagtgtggaatctcccctgctgacaatcacatagtcaattccggtttcctccgacacctttgccgcggtttccccgatttccaggtgggccctggtggtctgttccacggtaaatcccctggaattcgtcagtatgtagaacagcttcccgtcctcttcaaagcctttcttaatactgtcataggaccaatccgtatacacggaaacatcatggaccgtctgcacgccggtgggatcatcgtccaggactatgattttatgtctgtcctgccggcatttttcttccagcagagcctgcacggcgtcggtgtccaccccgggatactggtctaatacagatgcattcaacatggtctgttctcctctctcttatcttccgatgcgaaacagctccctggcctcatccggcagcatgggctctttatccatggccctgagaagcttcactgtcttttccacaaggggggcattggatgttacctgggtctgtgcgtccagataattgctgtcctcaaatccaattcttacggtcctggctcccatgcccagggcaccggccagcagcgaaaaatcctttctgtgggcctgtgtaatgccccacacggcattggaaggaatcatctgtatcatggcagccagggcctggggcgttgccggggcttctccctcatggcccagcaccacactgaacagaaccggatccgcgaagtcatacttctccatcagccgggccatggtccaggtgtggcctatttcaaacgtctccacctccggagtctttttctgtttcagtatttcccggatacagtactccacgtcgtctataggattgcagtacacagcctttcccagattagtggatcccacgttcagggagcaggcttccaccagctcagaatacagaggggcgcagcgctcccgtatgttcaggtccgataccccgcccgtggacacctcgatgatgatgtccgaatcccggcgaatcataaccagcgtctcctctaacagggacatatccggcgtcagccggccttccctgtctcttacatgaaggtgcaccatggcagcccctgccttataacacttatatacatcctccgctatcttctccggtatgatgaccttgtcctctgccgataccggcgcaacgtttaccagaaccttattatccatgtctgtcatttatctaatctccctttttacaatttctgcatttacgcaaacagtacctgtgcaatcagcaccagaggttcatcccctgtctgtgcaatcccatggctgtccccgggctgggctgcgatgatgtccccttcctccagatactggtcctgtccgtttatagtgtgaacggcttttcctcttacaataaccatggtttccatttccccctcatgggtatggatgccgattgaaactcccggattcagcgtatggcgcacatacgctctcccctttcccatcatttcctcctggcctgtgagaagcttctccatccagacggttccatttccgcccatacagccttcaatcggcgttctttccagctcatttttcgttctatatatcataaaaacgctccattctctcaaaaaaataaaggggctgccgcatcattggcttcagacatatcatctgtcctgttccggtcatcatgcagcaaccaccttgctattcatcttttacttttgcccagtactggtaatgttcctctacaatcgcatagatgccggccgaatccctgtcctgcagaagcttcacgattctgcggtgcaggtccaggaagttttccacttccccgtccaggaatatccggtctatggtcaccatacgggaacggcgggtgattttgtccacatagttgcagatggactggagcatcacattttccgtgattcccacaatggccatatggaactgtacatccgcctcatacaggctgcgcgcctggggcttatccatatgggcctggtactccagctcctccatggccttctcaatggcttccatctgagtctgctccagggatttggacctcagtttatccacagccagctggaggaggcccacatcaatcacctttctcagctccacaatctggctggtggaatccttctgcagtatgataccgtaaagcaccggataaatcatcctgctgtcatattcctgactcacaaaggtgccctccgcccgcttgatatgtaccacaccatatgcctctaacaccttgatggcttcccggaccgaatttcttccggcccccattgactccgacaattctgcttctgtagggattttgtcccctgggtttagctctccatttatgatagcattggtaatgttgtctacaatcttattaacaactgactgtcctccgacaggttcctttaaaaaactggtcttttccatgctgaacctcctttgctgcatacacctggcagccctgctttggccgcctatgtgcagtgcttaccgcctccgctcaaccaggcccgtcaggggcctggcgtggcagtccacttatccataagtatacatcatatgttggttcagcgcaatcttctgttccctggctaggaaggaatcaggcacagggacaatgccggtatatatgtaatgcacagcagggccagaagggacataagcagtaacggcaccatctttcggcatatttcctcaaacttaacctttccgatatcagccgcaacatacagattgggtcctaccggcggcgttacctggccaatggacaggttcaataccaggatgacgcccagctgaatcatgttgatatccagggcctttgcgataggcatgatgatgggaaccaggatatagagggcgcttgtattatccataacgcagcctgcgcacaggaatacaatgttgatgataaccagcatgatatacttgttatctgtaagggccagggccatttccgtaagggaagcggcaatcccctgctgagtcagtacccaggagaaaatgcctgcattcatgatgatgagaagaatcatgcccgttgtcttggcagtggaaaacagtgtctccttaagctccgccaggcgcagctccttatagataaaaattcccactatcaggctgtaaacaacggcaaccgccgctgcctccgtaggtgtaaaaagtcccgaataaatacctcccagtacaatgaccgggcttaaaagtccccatattgtatccaggaacagcctgccgatttcctttaaggatgccctctgggtttcccccttccatccgttcttcttggacttaatgaacaccataatacagagcatgaagccgaatataagtccgggtataatacctgacaggaacaggtctccaatggattcccctgtaatcatgccatagataatgaatgtaatactgggaggaataaccgttcccagggagcccgatatagcggaaagggcgctggaaaatcctgcgtcatatccctgggccaccatggccggaatcaggatggatcccatggctgcaacggttgctgtgccggatccggagatggccgcaaagaacagggctgccaccactgccacataccccagtccgccgtgaaccggtccgatgatgctgtccgccaggttgataaggcgtttggaaatgcctcccttgtccatgattgcgcctgcaaggacgaaaagcggaatggtaagaagggaaaatttctgaacagtggcctgcatcatggaaggaataacgcccagaggggcgcctgaaaatatcagggtcagtgcgctggacacgcccagcacaatggcaatgggaatgccgaatccaatcatcactgccatggaaccaaatagaatcgctgccgacatattaatttccctcctttgctaatctgatctcatactgtaccatacgggctatggaaaaaaccgctgacaatggaatggcgattccgatggtccactgaggcatctccagaacgcctgtaagcagatgatagtgatactgcctgtaaaccatctgtgctccccatataatccagattccatagttggcagagcataaaaggagcctgcagatacggtaaaccttacgtttagttccggtgaatttatcagtcaggtaattaaagcccatgtgggaatctgtcttaaacacactggccgcggccaggcagcagacccacacaaacatggtggtcaccagttcctgagtaaatgacatgttgaaccatgtaatctttcttgagaacacattcataaatgtgacaaaggtcataacaagcaatgcggctgaacagagatattcctcaaaattctcccagaagtcctttaacaatcctttttccttcataacgcccctcctaattcttataaccgccggtaaacaagtcgattacatcctgtcccacagattttgcataatcatcatagattccggcgcaggccttctggaactccgccttctgctcctctgtcagctctgtgataacggtgcctccgtccttcagcttctggataatgacagcctcgttgtcagccagataatcatttccccagtccagggcttctgccgcgcactcctttaccagctcctggtcctcaggggacagcttgttcatggtcttgcggctcatgacccagatggtggtatcccttaccccgtcccacagggtaacatactgctgtacctctgcaaatttagaagagtcaaaaaccgcgattgggttctcctgcccgtctatggtcttctgctgaagggaggtgtacacctctgagaaatccatggcagtgggatttgccccaaagtaattcctgtacaggtcaatgaaaatattggcgcccggcacacggatattcatgcccttcaggtcctcaggctttgtgatctccttcttgctgttggatatctgtctggaaccggcgttattgatgcccagcatttccatctccaggtcattgcaccagccgtttaccacctcatgcaccttatcgctgtggcagaacgccagcagatcatctgaattagggaacaggaacggcagccagaaggaataaaacttcttatcataattggcaatgtttggcggtgcgcaggagtggatgtcaatgttgccggcctgtaccagctcgatggcctttgtcaggtctccgccggacagtccgcagttggaataaatgctgacttcaatccttccgtcactccgctcctccaccagcttcttaaactcctgggcagtcaggtcgctgatggaccccggactctgtgtatgggtaaaatgaagcactaccttcttatctccggcagaaccgcaggccgtcatggacaaaaccatggccgcagcgcatatgactgccgccgccttttttaaccttttaaacatacttccctctcccttcgttgcgtgcacccggcctctgtgctttcgctgcctgtgcgcgatatgttctaacgcagtacattccaagtaatacattctaagtaatagattctaagcaatacattctaagtaatagattctaagcaatatattctgagcaatacatcccaaggaatcccgtatattacattagtcccttcttaacaagagcgtcctttagtgcagcagcgccgaatctcggactggataatactactttaccatacttttcatgaatatactcctcacagtaggccatggatccctgggcaaagagaatcacatccaccttgtccgcaatggttcccgcatattcactcataagggccttaaactgttcctggtccaggccgaagccgccatccaccagcgcgtccaccagctccacctgacggttcatctccctggcaacccttaaaatagtgttctttgtgggattcagtgtggtgggaagggttgccataaccccgattctttttccctgccttactgcctcccggcacatctcctcatccacacgcacaatggggattcccgtgtatctggcgatatcctgggcagcgtccgccacctcgcctacggaagaacaaagatttaaaatagcgtccgctccttccgaaacagctgtcatatacatgcccaccagcctggctgccggaggagccgtcacataacctgcgtccctgacctctgccaggatggaaggatcctggtaactggccacctcagtctcccggggaaggacatcccccacttccttttctactaattcaatcaactccggtgttgtgcttgtgtaaaccaatgctactttcatgaattatcctcctgatatacttctattagaaccaacatccaacatcctatgttttatgagataaatatactacatcctacgttggttgtaaattgtgaaaatgcacatgattataacacctcttttatgcagttttacttattaaaaatacaaaaaacatggaaagaacctgcaagtcaggatctcttccatgtttttcattctgcatctctcccgcactccggtacgtgaagccctcattgaactgagcaaagtaggtttggtggagatccagccccaaagaggaagttgtatcgcaaagattgtctatgaactgattggagaatcccggttcatgcgcctgatgctggagaatgccgtgttaaagctggcctgcgaaagtatttcacaggaatatatggacaaactaaaagaatatctcaggatggagacaatatcctgaatactgtgtgaaataaagaagatttctccccaggagatacggatgaaatataccggtatttcctggggatatttttatttttttcctcccttctattacattcaggtactgcaaactattataatgtaatagaacattatgttatattcttattgactattttaatataacgttatataatgtatttataagacaaataaaaactacatatctctcaaaggaggccctatttttatggaactaaaaaaaattatcgaggaaatcaaagcagagcgcccggaagtcacctcagtcatctttgtaggatgcggcgcatcccaggcagagctttatccggccaagtacttcttagagggcaatgcaaaaaagctgaggaccagtctgtacacggccaatgaatttgtacatgccactcctgcgtgcgtgggcaaagaaagtattatcattacctgctcccttggcggcaatacccccgagacagtggaagcctccaaaaaagccatgaatatgggcgctaaggtaatagccatcacacatacccccggttcaccgctggctaacagcgcacactatgtggtacttcacggatttgagaagaattatgcggccaaactggaaaaaatgaccttctgtctgcagctggcagctgaaattctcaatcagtatgaagggtatgaacattaccaagatatgatgaccggttttgctaagatctttgacttaatagaagacgcagtttccttcgtagtcccttccgcaaaaaagtttgcagaaaactacaaggatgctcctgttatttacgttatgagctccggagctacccatatggtggcctattccttctccatatgccttctgatggaaatgcagtggatcaattcaggctccttccatgacggcgaatttttccatggtccatttgaaatcgtagataaggatgtgcccttccttctcctgatgaacgacggcagtaccagagcattggattccagagccctggacttcctgaaccgtttccaggccaagaccaccctgattgatgcaaaggattttggattagggtccgtaataccatccacggtcaaagattacttcaacccgatgctgattaccgcagtgctgcgggtttatgcagagcagctggcaatcctcaggaatcatcccttgacccagagaagatacatgtggaaactggaatactaattatctttcacattcaaaagggcttccggctgctgatgctttgccggaagccctttttatggaggtaggactatgtctaaattatccggaaggaatactctcttatccatggccggtgccaccgcgggggtattcctttttgcattttcattctgtgtgtttctgcggcctctggggctttacagcggaggtttcacaggcattgcccaaatcatacatctggtctttcaggacattctcaaaatcccgcttcccggaggaatcgactggaccggaatcattttctggatgcttaatatccccctgttcctgttatcctatgtactcatcagccatagctttttctataagacaattgtatgtgtatgcctgcagtccctcttcattgcgtttatcccatcgccggagattcctgtgttcacagatccacttgcatcggtccttgtgggaggtgccatatccggctttggagtgggtctgaccctgacctgcggcggttcaggcggcggtgtggatatagttggaatctactgtaccaagcggtttcccaggttcagcgtaggcaggatatccattttgattaatgtactgatttatctgttctgcgcattccggtacaatctggccacagccgcatactctgccctctttgccatcattgcaggggtagccacagataaaattcattatcagaacatcaaagcctgtgtcacaatcatctcccggcatccagacatccagaatataatacttaacaacctgcaccgtggtgtcacaatctggaatgcctccggcggctataccggccagtccacctatgtctacatgactgtcatttccaaaaacgagatagaaccattaaggcaactggtcctcactgctgaccataatgcttttattgccatccagaacaatatagacgtcaccggccactttgagaagcgtttttagagaggccggaacaaacacatacgtttttcatagcgggcgattctgtcaaagcccgctttttttacgaggccgagggcttctatgaaaccgcttcccacatcttccgggagatgcgcatcagaaccaactgtaatcacagtgcctccaagctctttgtacagcttaaggcatctgattccaggcatggtttcccctgctccctgcctcagccctgatgtgttgacctcaattccctttcccctctcaatgagcgcggtcaatacctgaactatcctgtcctcatatttatcataatcatccggaagtcccgctttcctgcaatgacgcttgtacagatccaaatgtcccatacagtcaaaatcccctgtccgtgccagcttcagcaggtgactgtaataagcatccgcaatctgctgcaccgtatccttccgaaactccatctgacttaagtcaatgttatcaatcttgtgcacggaaccaatgagatagtcaaagggccagctctttataatgccggatgccttctccgggtccaggtgaagctgcccgaattccatagcgctgcggataataagccggccttcatacatctgcctgcatttatccagttcttcaaaataacggataagatatccccggttaaaatatttcccggttatcccgcctgcgtaaaactcatagtggtctgtaaatgcgatctcttctatacccgcagccatggctgcattgcacatttcctccatggtacccttggcatcgggggaaattgtgctgtggacgtgataatctgcagttttatattccatgttttttattcccttttatatttagtggtctgtatcatacatgtaatttcctgtaacagtaaacaggaggaaccatcctgttcctcctgctgatatatgacattctaattatctatcccttgaccgcaccagaggtaagaccccggacaaactgtttctgcatacacagataaagtatgatcattggaagggatgcaatggtgatgcctgccagcattaccacatagtccgatctcatatcgcctttaaatgtcatcaaaccgataggaatggtcataatactcttactctccaggaacacattggcaaacaggaactcgttccatacgaaatttaggttcacaatggcgcaggatgcaaaaatcggcttgctgatagggactataatctttctgaatatctgaaagctgttgtagccgtcaataactgccgcttcctccagttcctttggtatacacataaaataagcacgcatcaggaatacggtaaacggtatcctgaatgccacatagggcaggataaccgcccaatatgtattatacaggtgtgtggcctgaagtatcttatacagaggaaccagtgccacctgctccgagagggccatgcctcctaatgtaatcaggaatatcaggtttccgaatctgctgttgaatctggttatgccataggccagcagggagcttagaaacagaatggatataagtgaaatggaacttacaatgacagaatttccaaagtatttgtaaagtcctttattccatgctgatatatagttggcaaactgtactttcgcaggcagcgccagagaatcggtaaacagttccacattggtcttcagcgaattcataatcagccaggctgccggcagtataatcacaagcactaacagtatgaagaatatattcaaaagtatggttactgctgttcgtttcttcatatgcctctcctttctacacttccccagacctggtgatcttcatctgaatcagcgacagcaccatggttaccatgaatataaatacgccggttacagcagccattcccaagtcatcgtgaaggaatgcgttctggtaaagaaacacccccaatacctgtgtactgtttcctggccctcctcctgtggtggaatatacctcggtaaacaacttaaacgctccgattaccgtgatgattgagcataccagaagctgctcctttgcaagaggcagtatgatatggagtgcacgttttacaggtcccgcgccatcaatagatgctgcctcgatataatcattgggcacattctgtatggccactaccatgagaagagtgatatatccggtaaactgccactggctcatggctatgatacagtatatggcaatcttggaatctcccagccatgaacgagccatatccccgtgtcctatagctctcagaaatgagttgagcatacccaggtccggctgataaatgaatgtaaacagaataccaacggctgtcagagaaatcagggctggtatataatatatattcctgtacacattgcggaagcgtcctgttgccttactctcaagaagaagcgcgagcaaagttccgaaacccacctgaacaacgagggaaataatacagtacagtccgttgttcttcagcatgataggaagggtatccttagtaaaaaaacggatgtaattactgatacccacaaattttgccgaagaggagtaggatgacaagctgaaaaagctgtatacgatatttgttatgaccggtatgtatacaaatacaagtaccataataagaccgggaatcatatacaaataaggagtggatttcttcgttctcatagcttttacctactttcttatgttgcagggggatgtttccacatcccccctatagattactctgacttagtctgcccggatacaagactctgggcttctttagcgactttctgtactcttgccattgcctccgcaggtgtaatatctccatttgtaaggtcagaagccgctgtgagatattcatcacatgttgttgaataaagagcgttgtcaaaccatggtcccatgattttggcttcatttacaactttataaccgtccagcagtttcgtatcattgactccttctgtcacattttttgatgcgttaaaccagccgatggtctgtgcctgctccttgcccacttccggtcctaagaaccatttcagaaactcgatacattcgtccggatactttgttttggacgaaaccacaaatccttccggaacgccagttaatatatcagggttgcctggcccttccactacagggaatttgaacataccgtaatccagatcggcgttcaggtctgtaatatatggaatctcaatgagttctgcatagtacatagcggacttgcccattgcaaaattagttctggccatgtctgctgctgtaccgtttactgcatcgttgcaatagggaatcagctgctgatagcattttaatgcttcttcataaccaggatcggtgaactctccctgggcaggatcaaaatctttctctctcacctcatcgcttacaagcatctggttcaaactgccaatatagtgtgctgccggccacttttcctgatttccataagatatgggagtgacaccagccgctttcagcttatcacacacttcaatgagctcatcccatgtagccggtgccttcaggccgttctcttcgaatatttgtgtattgtagaagaaaagcttgcagtcaagtctgaatggaataccgtatgtaacaccatccttcgtatagtttaccagctgggactccataagggaatctttccactccttatctgcttccaggtatggagtaagatccataatcaggttttctcttaaaaaccgctccgaaaactcgccgcaccagctaaagaaaatatctggagcatcattaccgccaaccactactttaattttctctttgtatggatcattctgggcactctcaactacaatgtcaatatcgggatgcgcttcctcatattcagcaatcttgctttcaataaagccattgaacggttcatcaggaaatctgtggaaaaactttatggttttcttcgctcctgatgtctgagcagcctgagtaacacctgtgtcagctcctgcctccaaagaagccgttgtgtccttcttgtcattaccgccgctgggggtaaatcccgcacaagctgtaagtgacattgccatggttcctgccaacagggcagccgccgctttcttaacaaactttctcataataaactcctttcgcctcttcataatactttttatataatgctttactcattctgaaacactttgccaaacccgaaggatccatccttctggcagttgcctgccgagtaaacggctgcgcggtacagactggttctgactgtcaaatcctgatagtctgcagctgtcactgttcctttagttcccgatgctgccgggaagtccctggagtccttcatggcatccacataatttatcaggaagcaggtaataaaggaatctcccgctcccatggtatccaccgcctctaccaaacatggtgactgttcatagagacgtccgtccaccattaccagcgcccccttggctcccctggtagcaataacaatatgtctgcatccgaatttccgaatcagagtcatctgtttctcaatctcgcttctgggcatatcgccgcaggagatgctggcacagtcaacatatggcgcacattgtctcaaatattcctcgtctgccctgtccgaaaaatccatggatacaaaggatgatgcctggcggagcaacggcagctcatcttctatataactgaagatactggtatgtacaatgtcatagccggctatataagccctgtccattgcagtcagttccagaggatgttcccttgacactccgcctttgtttgagccgatgaacacccggtccccgttgtccagacgcacctcggcatatccgttctctccaggataaaaacggcagtgggagagctccagcccaagaccacggatcgtatcatatacatgagcggcggcctcgtcatctccgaacacccccagataaccggcctcaattccgaacatctttgcatagactgcaaaattcaatgcgtttccgcccgggtacatggtgcggatgtgcatatacttatccaccacgttatcgcccaatcccagtactcttaacatgtcctcacctctttgttgatgtgttttaattatcatgtaatcattatatgacgttatgtatattttgtaaacataaaatgtggtcccattctaattttcgtatatttagcacattaattacgtatatttttgtgctatttatccaaaaaagcgaactccaatcgtctgcacgcaaggaatccgctttattagtatacttaccactcaccatggacttcaagtcaatacgtcatataacctctcaacgctttgtaaaacagaggatgtgggatccactctgtatctgccgtctgttatctccagagacaggtaacctttataagaataccgtgaaaactcttccagataccctttcatatccagaactccatccccccatgccaggtgtcctctgggagcaccgtcgataaaatgcacatggaccagttgctccccgaataccttcaggtaatcctccggccgctcacctgccaataccataggaattgtatcaatcattgccccgattgccggatgacttaaatcctccatcatcctcttaagagtgggcagattgtagaccagattgctttcatcccggcgcagcacctcaagggccagtttgatgccgtaatccctggccatatcccccagggacataagaccttccctggcatatttccaggcttcatttatattactattatccagatatccccatccagtagtcaccagcatcttatccgtgcctaattccgctgccgcacgcagattatcttcgaaatacttaagactgcgccgcctctgtaccgttgagtctgccgctaaattcacaggataaatacattgttcgggggtatagcacaccagtgacaggcccctttcttcaatctgctttctgacacggcacacatctgtgtacgtcatatcttccaaatgaaaatgcggagctgctccccacagctccacatgctctacgccggctctggcagcgtcatctaagaatttctccagtggataatagccatattgaatattcattaccgatatctgggatttgctgattgttatcattctctatccgccttttctcaagcattaaccatgaccgtcatcttataacggtccggattaatcacacttttacaattatggacaggatttccctcccgatcatagctgacatcttttacataaagcaggggcttgtcgagatccacgcccagatgcttgtgctcaatctcattggcctggcatattccaatccgcttaatgccattgtccataattgtcccattctccgccaatatctgatagatggagcctgtgagatcatgccctaaaaggtatgcgaaacgagccggaaagtgattttcctcaagcataacgggaatcccgtcgcaggtccgcacccgcacaatcttaataattttctcatgttcctgaatcttcagttcctctgcgtccaccatggtggcctctgccagttccgcagacaccaactgtgccccggccgtgtttccctctgccagacagctctgagtaaatcccatgaaaccattgatattacggcaaagctttttctgcgacacaaaagttcctatgccctggcgctttaccaatatctcctcctccaccaataattccacggctttacgtactgttatcctgctgacgtcatactccctgctcaactctatctcagtaggtatcctatcattttcttttaattctccgttgagtatctgattctggattacctccatcagctgctgatacaaagggacgcttgattccttgttcagttttcccatgattccgcctccattgattatgtctgtatcattattatacgatacatgaccatatatagcttaagtataccattgggaaagtattcgtgcaaccgtttcaaacatcccttttctccttgatttcaatgcatttttggaactgccagcatacattctgaagggcctggtattttagtaatccagcctcctataataccttctgatagccaaaggatgccgcctgttatactccaaatgcgtggacaccctctggaacgcagagcgcatcataatcgggcagagcattcccctgaactcgtcgctgatccccttaagctcaaactccttgctgtcaaacacagtcaccttggcgctgatcttgtggacaaaattttccaccctgtccataagcggacgggttttatcctcacccttaattaaaattacagaggtatccctgtcaataacctccaatgtcccgtggaagaaattagaggccgatatgggccttgtgcgcatccactgcatttcttccatgatacacatgccatagcagacagcccagtcctccagattgccggaaccaaccagatactggatgggctcatcctgatatgcccttgcatattctgctgcttttttatccgccttcttataaatctccaccacattctccggcatattcttaagttcttcaaaaaacttctcataccgtggaaactggcctgcatgatacatgaagcgcagggtcacggtataccagaaataatatccgccgcctgtggtggttataagataatctgatttttcatagagcggactgccttccttctccacataccctataaccgctgccccgatttcgtgggccttatccaccgctgccaccacttccttcgtatcaccggaaatactctcgataactaccacggaatctttggaaaagtggggattgtccaccacacagaagtccgctgcgttttcgatgaacagcgggatggtagaaccttcttcccttacgatgtgggccatctggttggcatagagcacggttcccccgattccgatatagaagatatttttatatcctctctttaccacctcatctactgctttttctgttgctcccacaatgctgagtccgtttttgtgctcctgcagaacctttgcctcatcaaaattaaacataacagctcctccttgacgttatatattgttatgtataacatatcataacatcatgtaaaatacaagatgaatttgctcattatccataaaaaatcatttcaacagggcataataaagcattcatttggacatcaaaaaagagctgccagccctgacacgtcatcacatgacccgccggaacaaaaacagctctcttatctcaaacctactctaacgcaaacatagacatggcattcagcacatcctgctccattgcatccactgccgcgttagccaaatcatggaagtatttgacttccttctcctccagcagtttcttcactgccttcacgcccgcgttggacatataggagaaatagttgattttacggataccgcagcggatcgccctctgggtatccgctacgctgatgccggatcccccgtgcataaccagcggaagccctgtcaattccttgattttcacaatccggtcaaaatccagctttggcttggttgcatagaatccgtggacggttcccaccgatgctgccagggcatctatgcccgtatcttttacatacctggctgccagctcagggtctgtatacgcgtcgcttacatcattgatggcaaaggtttttccctcatgtcccgtgacaatgcctatctcagcctccacatccgcgttgcaggcttttgccatggccactacttccctggtcattgccacgttttcctcataagcaagggaggagccgtcgtacatgacagcggaaaaacctaaatccagggcttttctcacatagtccaggtcctcgccatggtccagcataacgcagacaggaaccctggcctccttcgccatacgcaccatgatggggccgatgatatgaatgggcatctcgcactcatgaagctgcgcgtgctggataataactggttcttcacgtttctctgccgcccgtataaccgccataagaatttccagattcggcgtgtcaaaggcacctacacagcattgcttttcttccgcataccgcagaacatggttcatatttactaacatccggcattctccttacttttcctcatagagttcaacaatggcatcatcccagattacaaatgccaggcgcacgccagggccgcagtcagccggcccgaatatgatcctctgagcctgggaggcatagtggtccaaatcgtccaccctgtaagccacatggggctgcttggaaagaatctccgggaagggtgttccctcctcgaatttcaggtactctatcttaaaatcatagtcatccacattgcttacccagaacttcatgtcctcgttatatgtcattccctcttttttatttaggaccgggattcctatatgcatatattctgccgccatgacccatatcctcctcatctttctcttaaactgatttttccttgtgccgccagtacgttcataaacaccctcttatttcttcatatacggcgtattgcacggtgcattccagtagtgcagaagctcatcgtccatccttgccatgaacatctggaagccggcctgctcctgtacggtgagaagctcgcccacataattggccacaatctcaatgttcttctccttcaggtaggatacgcacctgcggtaaatgataaacagctccatcagtgtggtggcgccggttccgttgagaatcagcatgattttctcgccttccctgatatccaggtcagccagaaggccgtccagcatgatcttggctgtttcatcggctgacttcatggtctggcgtccgccgccgccctctccgtgctgtcccatgccgatttccatttcatcctcgcccagatccgcgagcaggcttcctgttgccggatgggtcgctcctgatacagctacggccagggtagccatgttatctgcaaaccgctgcgcaatggcagccacttcctccaggctctttccctcggcagccgctgctcctgctatcttataggtggggatacatcccaccaggcctctcctgtcatcggcgttggagcggggcgcattggcaatatcctcctgtgtcactaccttgaccacatttaatccttcctttgcgcatttcttcatggtcaggttgccggtaagcatgtcgcctgcatggtttaagactatgtagagaacgcccttgcccttgtctgccagctttatggcatccaggcaggcctgaggtccgggagccgcgaaaacatctcccaccacggagatatccaccattccttctcccacaaatccgctgatagccggctcatggccggatccgccctgagtcacaatagtaaccctgtcggcttcagccagcttattgttaatgatcatgcggttttcacccagggtcaccagctccttgtgtgcctcggcaaagccttctaacagctccggcgtcagattctcaggattgtttataaatttcttcatcttcataatttttacctctcccaattttattttattgaccgcatccgtaagccattcacttccgtatgccgtccacttccgttaccttctatttccgttaccttctatttccgttaccgtccacttccgttaccttctacttccgttaccgtccacttctgtaaccgtctacttcagtccgtcacaaagtcctgcaaaaaacagggatgtgctcaccgcacccgcgtccggagtgccgatggtcttctccttatagcttctcgccctgccatacttggacacatactgttcgctttcctttgcgcccctggccgctgcccccttggccgcctccagcacagccatcacatcgtcctttgctttctgggctgcttccacagcaggaatcagggcatccatcatggtcttgtcccccacgcctgcgttagtgatgtcttccatggccgacaggcattccgtaaacatttccttcagagtacctgcatcaatgggtttattcccttccaggggacctgacagtcctcctatcatggttccgtataatggacctgcgcttcctcctccgatctccatggtattgtctcccaggtcctccagaaatgtctccacgtcatcgtcatcccagccatccaggctcttctcgatcagaccggcaatctttccaatggtaacgccgtggtccccgtcgccgaatctggaatcaatttcgctgagataatccttgttctcattccagacctgggcggcttttctgaacatttttgtaatttccggttttgaaagtaacatatgtaacctcctctcatgcattttccccaaattactcatgattttagattaacatttgttagttcctttgtcaattattcatcgctcccatctttattttttgccctaatgcacaaaaaatgcgcagtccctttagcaaactgcgcatttatggttacgtatgtaacccaatattattctaacgcttccctgaccacatgctccggtgcaataaaatgtttcaggtaaccggtttttaaggctgccctgaatgcctttgggctggtattggcagaacagatacccaccacatgccttgtcctggtcagaagctccagtggaatctgaatagcgtaatccgtatctgaccggatgatatgtccctggctgtccataaaataattcaggatccgccccactgccttctgccttatgagcaggtctccatatctggcctccgaagcaaaatccggtaccgaaggaaaattcccgatattgaccagcgccacatccagtttttcccagacatgatatatctcatggtagctgtccagctctctggtcagtttcagctcctgctcagaaagcacgcaggccggtgaatagataaatctgggctgggccccgctgtgctccgcaatggaacgcaccagttcattggagtggtaattcttaagccccacgccgccgtttcctatgagcgggcagacaaatgttcctatgggcaccagcttcgccttctgctccatatgctttacaacatcccctatgatatggccccatccaatgcccaggctggcgcctcccagctctgacagataagagatggccgcctctgccacagcctcattggtagtctggtcatttggcccgccgggtacagccacaccgtcataaatcccaaagcagcgtcccaccagttccatcagtgacggcgcgccgccggattcccccttgggtgcatttatccggatggtgacaatgccccggtcccgcgcttccttcaaaagcttgctgaccatgggacgggatataccgtatctgtccgcaatctcactctgggtcctgtcctgctcataatacattctggccacattgaccagacgctctgttttcttatccatactgcctcttattcatatcgcctggacctctttggcatgtcacaaaagcgtatactccagcatctcatacgccagcctgctgccctcattaatatcaccaggcagaagggccctggccacgcatttctcatcgtcatccaaaacatccgtgcgtttcagataagcgtaatccccatcaatccgttccactctgtaatccacacgctcaaacatggctgtattccacctccgcttcctatttacggccgcagcactggcggtaacgcttaccgctgccgcagggacagggcgcatccgggtcaatacgggctgtcttggcgtccagctccacccggttataaccacagcttccaaccgtcctggtttccttccatacctgttccatgatttcatcgaatccattcatcttttcctgggaatccaggttcagtccgaaatgctccatgatgtcttccactgcttttggcgttgtccccagccttatgtggtgatggatggaggacgctgcctcctgagcagtctcctcatcgcagccaaccatggccaggaaaaatgccttcagcggacggatatgcctcttaatctccactgctccggttctggcaatctcctttacctgggcggcagaaggtatataaaactccttgcccttctgataattcaagacatctttataggcatctgcctgaaccagatcccagtcaatcaaccggccgtcccaataagcaaaatcagtccagacccctttcatctcacggcaaaggcgggtgatttcccctgcatctgcctcacagccaactgccttgcagattgtctccacctgacctgcgtcagcggcgccgtaaaggtatactgccgccttacagcaggcccatacccggctgcggtaatgacgctcagaccggaatttctccgtattcagttcatcatatgcctctgccacatccgaaggaacaactgctgtgcccatgctggtaaacccgcagtaaccgccgtagtgcagaaaacggagcgcttccaggtccccctggtattccattcctccggctgctgcggccttctcaaactctgccgcggtttcatcgcttatggtgccgaaaaactgacccatgcgccgggaatccagcagggctgcagccagagccggggccagcttattctttcccagctcatcgcatcccccaatatggtgaaccttggcaatgcgcagaagctcggtcttttcaaacctggaaaacaggtcctccagcctgtggattacccttggggccggcctctgtgtttccggcttttcagtatcccggaggccggttacctgcttgtgggctgtatgttcccgggatgcatgtgcctgtaccacatgttcctgagccgcgtccccctgtaccgcatcctcctgtaccccacgttcctgagctgcattctcctgcccgtctcccgctccgccttgtccgaatgccggatgtgcctttaaattggcatttactttatccagatcatactcttccattccctgccggccggcccattcctccatcaagtcatgctcctcagcttcagggtcagccagctggtccaacaggtcatagtaaccgcctatgccgccgcagtcctccggaatattgtctcccttatactttaacacctggggatagctgttttcatactccacttccttttccatgagaatctggtgttcccatgcatccccgaagtcgtaggtatatataaaacgggggttctccgttatgagcgttccaatctgtgttccttcctccagcacatcgcagctgcaagactccatcagatcgtcttcctctcccggatcccttataagcagccccagtttcttaaactcaaactcgtgcaaatggtaatcataccagccaaaggcctcctgaatcacctgatggagctggcaaaacgtaaactgctccggcaccaccacgcgtctccatataggcggtttactgccttttatggtaattttcaactgataacctttcataaggccctccttcgaatttcaaatatttgtataagcaggcatcccgtgccgtaacaggcaatatccttccagtcaaaaacagaacccaggataatcctggccgcagtgttcccctgcagccccagcagctctgccagacggaaatactgcagcacctctacacataccgcaaaaagaaacacatataacggcagccgcttcatgccccttggtacgaacaccctgacaaaacagtacaccagcaccaccaccagcatgtcccctatataaggtctgataatgcgatcgtgaacatacagggcgataattaattccattataaatacaatgatacttgcggccagatatccccacctggccatgtattttttcccgctatccattgggcctccatctaccgtatgccattgagttcctgatacatatccttggcaaatgtgtctgtcatgccgcagatataatccgtcaccagcagcagacgcagatacagccgttcctcctcatccctgtcccgggcgcatatggaatatatcatcttataattgtcagatataagggaaaccagctttttctgcacctgggtcatgggcaggtccgtgtcgtagggaatcacagcatccacaaaccggtccaaaagaaaatcaaatattgtctgtgccgctatctccagtttcaggatgggtctggtgctgaacgcataccgcaaagcaatatcccccagcgcttccatcaacagctccacatccgtacctgtaaaaaggtccctggtataggtgccctccataatagattcatagttgccggcaaaacaatccgtaacgcctgaaatcatctggccctggacgctgataatccagttctgcaccgcatactggtccggcctgtcatatcccttacccacggccttcccatacttctcctccagccatgacacaatctggacataatggtttgtctggctgccggccttatacgcctttaactcagccaaaaggcgttcataagaaatacagcccttcttaaccgcatcctcaatgtccgccgtcttataggcaatatcatccgctgcttctaatataaatgccaacggatgcctttttcccaatgtgccggtagactcctgcacatcctggaaattctccctgtcgccgtgaaaatatcccatcttcttcgttcggatatcaccgctgtccttgtcaatctccagggaagataccggatacttgataatagttcccaagagagcttttgtcaagttcatgccgtgctcatccaccaggaaatgaagccttgtcaccaccctgaacgcctgggtattgccctcaaaatggcagaagtcctgtaccatctggggttccagaatctccgccagggttctccccttaaatgtaagtctctccagattcttcttaaaccaatcctgaatggctgtctcgccaaagtggccaaaagggggattcccgatatcgtgaatcaatccggcacactgaagaatgtcacacaccgccgccttatgctccggtgtaaaggtttcatccttgataatagtacggatgctctccgatatgttctgtcccagggatttggccagggatgaaacctccagggagtgagtcagcctggtacggatgaaatcactcctgtccagcggaaacacctgggtcttatcctggaggcgccgaaaggatgcactgccgataatacggtgataatctttctcaaactctgtccgcaggtccgtggaggactgtttcttgtaactgcggatgcggtcgtcgcaaagcagtgtctgccaatccatacatacctccttactgctttcccgcctgagtcctgccccttataatccatcaatcccggcaataataccgggccctgacaggacaaaacgcgggatacgtttcattctagtatatcggaagtcgattcccctgtcaaatatgccttttatatgtcagaatatgccctaaacatgcgtctatatctattatcaacaaaatcgtgaaaaaagcaacaaaaaactgcatcttttgcagttgacatccattgttatttgtgataattttaaatgagaaaagcaaatgaataggttcttcggggcagggtgtgattccctaccggcggtatagtccgcgacccgctgcatgcggctgatttggtgtgattccaaaaccgacagtatagtctggatgagagaagacaattttgttcctatgaatattgggtgttatcccttatttatattgactatgaagttaatctcaggttccccggaacctgagattttttgtttcctggaacttcattcattgccgaaccaccgtatcaaaagcacttatcaaggaggatttgctatgaaaacaaaatggagtattcagaaactaatttacaccggtatgctggccgcagttgccggcgccctcatgtcactggaattttccgttccaatgatgccgcccttttacaagattgacttcagcgatgttccgtccattattgccctgttcctcatggggcctgcttcagctgcctgggtggaaatcattaaaatcattatcaagcttatcacggtaggcaccaattccatgtatgtaggggaatttgccaatctcatcggagttgcattgtttgtaatcccaatgtgggcagtttacaaaaaaggcgggaagacccgccgggcagcaatcgcgtcattggctgtcagcgtccccatccggactctgttcgcctgtttctgcaatgcatttatcaccctacccctttatgcagcggccatgggactccctctgaaccaggtgattaccatggtggccgcggtcaatccggccatcagcgatctgaccaccttcatctttttagctaccattcccttcaacctgattaagcttggacttaactgctttgtgggatatctgctgtacaccagactgctggcagtttatccggctgtgagaaccgcgtgaggaaatgcgggttaaaaaacaatcaggaggttatacacatgatacgaaattatcgggacttaacccggttagagatggagcaggtcaacaaggatgaaaccattgtactgattcccctgggcgcgctggagcagcacggaaaccaggcgcctctgggtacggacgatatcatcgcagaggccatgacagactatatacgcagggagttggaaggagagccgtcatctgaggattcagattttcccatgctggtatttcctgtcatccccgtaggtctgagcacagaacacaggaacttctgcggctccatcacattgaaacccgacacctattaccatatgctgtatgatatcagcaccagcctggtacaccacgggtttaagaagctggcctttctggtgtgccatggaggaaatgcccctattgtacaggttttgagcagggagcttcgcagtgagttcggcatctctcccttcattctttcatccggggcctttagccatccggatgtgaaggccaccatttcagagggtaatatctgggacttccatggaggcgagatggaaacctccatggtcatggctgtggacccgtccctggtaaagttagatacctcagaggcaggaattccaactgcatttaaagacaatcaggcactgaggccttatggaaacgtatccattggctgggtgtccgaggactggaaaacagcagacggcaaacccataggaatcggcggagacccgtcaggcgccacggctgaaaaaggacggattattctggaaaccagcgccaaagtgctggtgccggggcttagggagatccgggcatggaaagggtgagggaggcccgcgttctttataccctataacagttttatggcaaaggtgggtgttcgcccacctttcttgttgcgtgttgttagttatagctaatgtttatgattcaaactatactgttttcttagaaaaaggggaatgatgttttgactaaacgtaatcctgaatttggcggattctcagcttgcttcgctgtgagggcggagactgaccagaaaggaaaagccactccgcccgcgaggacggagacctggtgcggggcattgacaccactagctggtataaatttcaacccactccgcccgcgaggacggagacggctgaaccaggatagaacagccagcataaggaatttcaacccactccgcccgcgaggacggagacccctggcggtcggactgatggccaacagcggaatatttcaacccactccgcccgcgaggacggagaccgaacggatgtcctgggagagacgttggatggaaaatttcaacccactccgcccgcgaggacggagacaatctcacgggccagcgccccatccggcgccacgatttcaacccactccgcccgcgaggacggagacgcccggaagggcagaaaggaacaaatatatgaatatttcaacccactccgcccgcgaggacggagactatcagtattcaacgatggaacaatctcctgataatttcaacccactccgcccgcgaggacggagactattagcctctaccgctccgcttaaattaacggtatttcaacccactccgcccgcgaggacggagactaatatgtatggtttccttccaggatatcccagtatttcaacccactccgcccgcgaggacggagacgaaaggtgccggcctggatgtattttcggaagtttatttcaacccactccgcccgcgaggacggagacaggctatgagttataagatgatgcagaatatccacatttcaacccactccgcccgcgaggacggagacagcaatactacacaaaaaaacaaacaattcttcatcacatttccacaatcaaatcacatcatactccctcaaatcaccgccaacctgccctgcacacatccaaaaccgttctcactgtgcagtttttccggtgcgaatccccccgtaaattcatgtttgcttctggttcgcaccaaactatttgaaacctccttaccgcccgcagccaggtcagaatatcagcggctcttccactttaatccctttactcaccccaacatggtccacctttgtagtgtgtttatttcccaggttgtaaaatctaaggctgtcagtctgctcatcaatgatatctgtcagtatggcttttagctttatcatctgggtattatccaaaatacattcaaatacagaattctggacgcgggtgccgtaattaacgcattgctttgcaacctttctcagcctggtcctgcctgcagcggtttccgtattcacatcatatgtaatcagtatcagcatgtaccttcctcctccggccgcagctgtcggatgtctttctatttccagaaaaacggcgggtattcatcaatgtcacctctcagatatctggacagaagcatggcctgaacaaaaggaatcattccccattccaccttctcattcagatatggatgggtgatcatctcctttttcttgttctgccattctgacaacaaaagcttccgtgcctcgtctctcatgatgacagcaccgtcttctttccgggaaaaatcttttttgtttaccatcttacggttaatcagggtcagcacaaaacggtctgcaagaaccggtctcagctcctccattaagtccagagccagggaaaggcggcctggccggtccgtatgcataaatcccacataaggatccaggccaactgtttccagtgctgatgcaacggtattggccagcagcgtgtacacaaatgacagcatggcattcacattatccaaaggcggccgcctgttccgtcccttgaaatagaaatcctttttctgctgtaatatgagctggtcgaaaactccaaaataaatgcctgcatcctcaccttcatacccccgcagctgggccatgtcccggctttcctctatgtgcctgagggattgtttcagaaatccggccgcttccttcaccttctctgtgtcaatctgaagtccatggtctctcaccgctctcttcagaacccatctggcattgtatacttttccaaggatacagtttctggctatggtcagacttgcgtcctgattcatggatacctggtactgtttcctgcgcagcagtacatttccccgcacacgtccggtcacgcgtgccaaaaatcttccctggggcgaaaggacgcaaagtgatatgtcccgctccgcgcatccgcccatgagggcagggctcattcccctgtacccaaaagaaacaattgcctccagattatggagaggtatccgccccagttccgtatcgttgtcatagattaccacattttctccgtccagcgacagataactgtcaggagatgtaacatacagggtatttaataacttcctcataaatcctcctcaatcttcccacggatataatctctgacagatgatgcttttcccagtttcggcagacatatatctttcatggagcaggcattacagctctttgaccatctgacccttggtgtgtatcccttgtcataaagttcatgcatctcctgaaatatatctctcacccgttttcgcagttcatctgtgatctccaccatattcctgcggtgaatctctccgtaatacagtgcccctgcctcaatcctggccgacaacatttcctccagacacatggcctgggccgtcagctgcagtatatctgcttccgactccttggggctcccctttttatactccaccggaaatacccggaacagacccctgtgaccatgtagtccgattccatcctccgccctgtggaactctacaatatcgcattccccgctgacacccatactcctggaatatacgggcaatgccctgcttatcatgacatcgcctcgcttttctgccaaatatgggtcatgggcttttttgtggagcagttctcctactatggtatgctcgttctccttccactgctgttcaatatgtataagggcccactggcgcctgcaaaagataaaatgctggataccggacagcatgaggaagtcatcctccctgtattccattatatcttctccgatacttcaactgtctccggaatctgatccctatggacggcaaccgtgtaatccccgtattttctgggatactccacatcctcattcctttttacttccacggcatcaaagagtttgtacgcaggacaatctcccagttccttactgtgtttaaacacaatgagccggcgtaccgccatttttcccctggctgcggaatggtcaatttcaaacatattgatgatggcatcccacaaaagttccaaatcctcttctgaaaagcccgtggattttctggccagattagctgatatgtacccctctgcgcggtacagggcgtagggaacgatattttttcttcccatttccgtactcttgttttccgcgtccttttctgtggtaatggccacacgggtaatggtcacttcctggcttacaatgggatcaatactcctggcaaagcctaactgaacaggtccccgcacctggccgcagtttaaagcagcctttacaaaggttgtcatgaccgctccaaaggtccggatatcaaaaaagttacggcacataaaatcacggattttctggtctacctgagggtctttcctttttagttccttgattcctttttcatctgtcttaagttcaatgtacgcggtattgtcgcttctgtttaagggtacatcctcccgtatatatattttatacccgggttcgtcttccttcagggtttccacataattgcgtatcttacgttttaagcacacatccgtcacaatgccgtatccgctctccgggtcaatcctcggcagattgcctgcatccggatcgccgtttggattcccgttctccacgtcaaataataccacgaattcatacctgttcttaatcacctctgccattttaagcctcctcctttatcttcttctcatatctcttctgagtctgatgataataccccaatatgaacattccctgttcctccagggtaagccttcttgggcaggctgccctctgtccctctgccaccgtcagccttccctgtaaatcacacagcattttttcgtaatatgtctcttttgccccattgttcatcttctttatgtggctgtttttcagcttaaataaaatggggaaaattgccgccggtgtggcgcatgcggaattaaaatatttatcctttatggtggcgttgatccccggattggcatcctcctggattgcctccagaaccgcaaattcccttcccaggatgtacgcggtattattgctgtcttcattaagcgccatggttatttcctcccttatatttccattttttagcagatatgccttgatgatggcagcccttcccctggttatcttataaatacggctgtccccgtcgtcctgctccgcccgtatcctgccaagcacggcctgatacagggacgccggataccggctgccggatataattgacctgtacactgccccggacatactgggaaccggctttttatccctggattttttattgaccgtctcctggagcatacgccatatccccagatactccacagcatcggctaccggacggactatttccattctgtcataatgttcttttatatgctttaatatgtttccaaagctgtcctgatagaagaaacgcacagccagcctggctgcgttgggtgccagccctaatatataaaaccgcttttccatatccagactgtccttaacatcctggaccgcaactgcttttccctccgccaggttcttgaataccccatccactatttcctggttctccatggtcggctccgacacacaggcaaatatattctggtaccgttcgtccccttcctcggaccagtaaaccacggccgtgtcgccgatggttgtcccatgggaccggtccgaaaggaggtaattgagcgccgtggtataggcataggccgcgtatgtacccaccggcgcgttaaagctctgctccttgccgtatgattcaaaggcaggttcattaaaggagactagcgcagctccgcagggctgggctcccctgacgcctttgatggtgccgtgaatcctagcgatttcctccctgcgccctgtcaccaggcagacgccctcaggtccggtacctgactgatggctgtattcttcccagcactgcattatatccgggtcctcatggacatattccccgtctatcatgaacaccagattagaaccggatataatctcctccagttccggcaccaggtatgggttttctgctgcccggtccggcgcccagcagtcaaaaaagcggcacaccgccctggctgcgggactgctgatattccccagaatgtccttatgcttctttttggcatactcaaaacattccctggatctctccggttttcccttattatcaattcccagcatataaccggaatggtcgcacaggaaattggcagatacaccggaacaacgggaaaccatttggggtaccgtaaggtcctggggtacccagactgtctttttgcctttctgctgctctttcttaagggggatgacacccataagctccccctgctctgaaatatccagcccgtacgctaccctggccctgcaccagcccggactggttatcttttccttccgctcaagggcttcataatattcaacaagcgcctggagaatcatcgcaccacctcacaattccttacatccagaacaccatccttcatgacagccctgaaaaacatgggtttaatgtgctcagtatctgagtaatccagatcatacagcatatatcccaaatctctctccgtgccgtcatatgcagtgtctacttcctcctcttcatagagggcaaaccgggcagggaattcccggcatccaaaatacggctgatgataacactcccccctgcgcaggcggcgcatgataatgtccttaaacttaccctcgttatcccccgggactgccttgggggtcatctcgaaatgggcctcaaccacatattccacatcccgaagaagaatggacgccctctgtacgatttcctctttgctgcttatatacagcggttttcctcccccgtttacggcagtcaatgcgtttcctgccaataccttgctctttacctcatttcttcggatgctggtaaactggatgggttttctcacatagattttgtcaatcacccaccgcatccccggatgccagtagatcgcctccagcattccccttgcggcggaaggcgtcatcacatcatagctgcaccgttccaccttcatctcagggcggctgaagagggcataatctccccacagccggacccgtactcctcggctcatcgcttcactcctctccggcatacgccattttcataaaagggacttaaaacataagggcatccccgcggcttacgtcaatcaccagccccctctcccttgtatactgctccttattcctcagaacataaaattcccggtctatctgttccaggcggcctgcgccgctcagggcttcaaaatcatgttcataaacatttacacagtactgtccggcctgcctgataagctccctgctatgtccgccctgccggatttgcatggcaatctgcgctgcctccggctctgtatcaattaaaatggtcctggtattgctctcaatcaggcgaaacccggaagccgctgatgcaaatggaaacataaatgaacggcttccctgctcgaactgctccaccacatcctttgcgtccaatccctcccctttataccggtacagcctggtgaaataatctcctatggcctccggcgacgatatatcttcatacttctgcgcaatctgtccggctactgaaatgggcagtttcaattcccgcggtatatggatatcctcctcttcctccaacgtaaatacctgggtcatacattcttccggatccctctttccctcccggttgcaccttccggcagcctggatcacactgtcaattccggccagttccctgtatacagccggaaaatcaaaatccacgcctgcttccaccaggctggtggatataagccggcatggttctcccgacgacagccggctgcgaatctccttcaagatctccttcctgtgttttggatacatcaaggtagataaatggtacgtcccccggctatcaatggaatcgcagacgcgctgcacccgttttctgctgttcaggatacagaggacctgctgccggccttccagctccttcaccagatgttcctgggatatccgccctgccagctgtatctttgtccttttgaaaaaatcatactgtccttttacatccggacatagttcctctgccttcagttcctgcatctttgcaggaaagaagggctgcagggacggctgggtagctgtacagataactgctgtgcagtgataattgcatataagctcactgatagcccgaatacacggcatcagatatttcaccggaagcatttgcgcctcatcaaatatgatgacgctgttggcaatattatgcagtttacggcattccgagcttctgcaggcatagagagattcaaaaaaccggacatttgtagtgaccaccaccggcttgtcccagttttctgcggccagctgctccatttttaattccttgccgctctccttatcctcatatgttacattacaatggttttccaggacatttttctttcccaggatttccttaaatacctgggcgttctgttcgatgatactcgtatatgggatcacataaataatccgttgaagaccatgttccgccgcgtggcgcagggcaaacccaagggaggacacggtcttgcctccgccggtaggtaccgtgagctggtacagtccctgcctcctgcgtcctgcctgcaaacaagccttcagtatagccgtccttcttccatttacagatgtcaaatcatcattggaaagccaggattccacatggctttccagacgcctgagaaggacatccatacaatcatagtctccccttcccgcatcctgtcccagcatgaattgttccgtatccagataatctccgtccacaaggcatgaaaacagcatcctgataaaaaatgacaggccaaagccgcccttgcctatctgtctcagcggcagcccgggaaaatccggcatctcaacttcatttttatacggactgtaatcctctaactgctttttaagccttccctgaagcgtggcctcccctgccgtgtctccggtccttcccccgtccagaaggcctgaatggtggccgctgatgcaataagcggcgcagtaagcagccagaggattggacccggcatacagccgcatcatctcctgggctcccgccgtggcgtggtccgtaatggaaccgccctccagacgttttctaaatccctgggaatatttcccgatgtcgtgcagaactccgcatccgtatccccatgctccgcaccggaacgcttcggcaaacagttcagaacgcctggcggtccctgtgagatggtcctttacggtctgttttcgagtcttgtcctcactgatgtgcgcatagtattgcataggttccccccttcccccgatattgtacaaattataacatatatttgtcttaaattaaataattttggcaaatgttaccatattcattatttatataaagacaaatattttcgttcaatgcgtcataaatatagacacacctactgctcttccacaaacagcggaaatccatcctcggccctgcaatctccctcctgtaccatctgcgcctcatcttccgggtactcaatgcagcaccccctgcctcttgcccgtgcgcacttgggatatctgggacagataaattgataacaaactttatctggacttttttgctccattttaattttcctccttgatttttatttttttctttcattatagcgtgactttctctttatttcaattattaataactgaaaatttgttaaaataaaaactattatgaaaacaatttaacaaatattgctttttttatatgaaaatgatatggtagttaatgtaatcggaagcaaggctctatgagccttatttataggagtgtaacaacacaaaacaaggaggtattacatgaacaaaccagaacttcagaacaggtaccagctttttataggggggcagtggcgtgacgcttctgacggtgaattctttaccacaaagtgtcctgccaatggagaaaagctggctgagtgtgctcaggctaccaaggaagacgtggatgatgctgtcagggaagcatggaaagcatttgaaacctggaagaaggttcctaccagtgaacgcgctgccattctgaataaaatcgcagacatcatcgacgcaaatacagagcacctggctatggtagaatcactggacaacggcaaaccaatccgcgaaaccatggccatcgacattccgttaagcgcaaagcacttccgctactttgcaggctgcatcatggccgaggaaggcagcgccaatattctggatgagcagttcctctccctgattttacgtgaaccaattggtgttgtaggacagattgtcccctggaacttcccattccttatggccgcatggaaactggctccggttctggcagccggctgctgtacagtattcaagccatccagcgacacatccctttccgtcctggaatttgccagattagtgcaggatgttattccaaagggcgtattcaacgtgattaccggatccggatccaagtcaggccagtatatgcttgaccacaagggattcagaaaactggcatttaccggctccaccgaggtaggacgtcaggtagctctggcagcggcggaccggctcatcccggccaccctggaattaggcggaaaatccgctaatatcttcttcccggactgcaactgggagcaggccatcgacggcctccagctgggcatcctgttcaatcagggccaggtatgctgtgctggctcccgtgtattcgtacatgaggatatttacgataagttccttgaggacgctgtaaaggcatttaacaatgtaaaggtaggtgtatcatgggatcctgagacccagatgggcagccagattaacgagcgccagctggaaaagattttaagctatgtggaaatcggaaagcaggaaggcgcccgcctgatctgcggcggcgagcgtatcacggatggcgaactggcaaagggctgcttcatgcgtcccactctgctggccgacgtgaccaatgatatgcgggttgcccaggaggaaatcttcggaccggttgcctgtatccttaaattcagggatgaggacgaggtcatccgcatggccaacgacaatgcctacggccttggcggcgctgtctggacccgcgacttaaaccgcgctatccgtgtatcccgcggcattgagacaggacgtatgtgggtcaatacatacaaccagattccggaaggatcacccttcggcggctacaaggaatccggtattggccgcgagacccataaggttattctggagcactatacgcagatgaagaatattatgatcaatctctctgaagctcccagcggattctatcctgcaaaataaaatcttatatccgcttagtaaatgattgaatctatgtattacatgataccataaaaccggaaaattcctcatgacagcagtgcatgggggattttccggttttatatttctaattccattcattccaaacacctctgactgcatcaatccataaatatggcgcattctaaaagcatcccaaaaacatttaatgaaacctacgggaaaatatgatcaaatatcacttgacatatgttactgtaacttttataattacagatagtaactgatatttatttgattacagtttgctcagaaaggaattgtcatgaacaacagccttaccggatttctcggtacctatgcctcgcctgaaagcctgggcatttaccgttttaccattgatttaagaaacggggcaatgtcttaccctgaattatattatgaagcccctgattgcaagtatctttccctgagggattccatgttggcttccccattaaaaagagagggccggtccgggatatgtcttttggatacagcccataataaggaggaagcccttgctcaaccggcagcggaatgcttgggtgagtcctcgccggcctgctacgcggcccaggatgaccgctatctatacacggccaactaccatgaaggtactatactgatatatgagataacatatgaggaaggttcccccggacgtaaaaagcgtccctccctcccgcatcttgaactggctaaaagaatccccattgcgcctaaggccgggtgccaccagattttatttcacagccactatatgatggttccctgcctgctgctggataaaatgatggtatttgactgccaaaaggattttacccttgtatcagaactggcctttgacaagggaaccggcccccgccacggaatctttgacagggaccataagcagttcttccttgtcagcgagctgagcaaccaggtttttgtgtacagtctgacagaagacggggccgcagggacagacagcagccataacagtatatcccttcctgacttttccatgaagctcctgcaaatctgccccatcctgcctttggatgcagtatatgaggaaccgcctgcatcggcagccatacgcctgtcaccggaccaacgttttttatatgtatccacccgatttgccgaggtcataacggtctttaaaatcagccatgggcggctggagcaaatccagcaaacagggtgcggaggcatccatccccgcgacatggttcttacgcctgacggccggtacctgctggtggcaaaccgcacccaaggcggactggtcagctttcagctcaacccggaaacaggggagctcctggacatatgctcccgcgtacctgcgccggaagctgtttccattgttctttcccagcatactatttaacccatatttcgcctgaggaggtagaagaatgataaaacttgatattggaatcgtaggtctttccgttatgggaagaagtcttgccctgaatatggctgatcacggatttaaggtgggcggttataaccgcagcgccgctgtcacagagcaggtcatgagggaccatcctcatgagaacctgatacccttttatgaccttaaggacatgacggacgcccttgcccatccccggaaggtaatgctgatgatccaggcaggcaaaccggtggatgccgtcatagaacagctggttcctcttcttgaaaagggggatatgatactggacggaggcaattccttctttgaagataccagaaggcgggcagccctgctggcagaaaagggaatccactatctgggggtaggcatttccggaggagaggaaggcgcccggttcggtccctccgtcatgcccggaggaaatgccgatgcttacgaatcagtacgtcccatactggaagccattgcagccagggccatggatgagccctgctgcgcctacatcggcccggacggcgccggacattatgtaaaaatggtccacaacggcattgagtacgcagatatgcagctgattgctgaatcctatcttctgttaaaatatgtgggcggattcaacaatcaggagctggctcatatctttaaatcctggaacgacggggagcttcacagctacctgattggcattacggccggtatcttccgtgaggccgacgacctgggggacggggagctcattgaccgcatcaaagacagcgcaaaacaaaaaggaaccggaaggtgggccagcatagaagccctgaagcaaggcgtggatatctccatgatcacttctgcctgcacggcccgtatcatgtccaatcatctggatgaacgggaaaaggcatggcagcttatccattcaccggctgtcggcctctctcctgataaagagtcgtttgcagccatggtccgcgaagccctgtataccggaaaaatcatcgcatatgcccagggtttctccctgatgcaggatgcatccaggctgtacggctggaatctggacctgggaaaaattgcttccatattccgcgccggatgcattatccaggctgttttcttaaatgacatcacccatgcatttgaagcggaaccaaagccggaaaaccttatattcgatggtttcttcctgtcccgcatcaacgagcatcaggacagcctgcgccaggccgtatccaccggcgtcatgaacggccttcccattcctgccctctgcaacgcagtgtcctacctggacgaattccgcgcaaaggcggcaggcgccaatctgatccaggcccagcgcgactgctttggagcccacacctatgagagaacagaccgcgaaggcgtattccaccatgaatggaggtgggctaatgacaatcagcactaaccttaccatcttcggcggcaccggagatcttaccttccgcaagcttcttcctgcactttataccatggatatcaccggaaagcttccggaggacagccgcatcaccatcattggccgccgggactacgacagcagccattaccgtcagattgccagggactgggtggagaaattcacccggctctcctttgaggaaaaaacatttgaccgtttttctgaaaaaatagattattaccggatggatttctcccgtttggaagcatatcatggactgaatcactattacagggaaaatgatatccactcccacatcttttactttgcagtggctccccgttttttcagcatcatcacagaaggactcaaactggtccatggttcttcctccggcaaggtgatacttgaaaagcctttcggcgagaaccttgctgcggccgcagcccttaacaaagagctggaagcgttctttggcccggagcatatttaccgcatcgaccactatcttggaaaagaaatggtccgcaatatccaggcaatccggttttccaatcccatttttacagacgtatggaattcccgctatattgaatctgtgcagatttccgccctggaggatatgggcgtggaaacccgcggcggatactatgatgccagcggcgccctgaaggatatggtgcagaaccatctgttccagattttgtccatcatggccatggaacagccggaggaattcagccctaaggggctgcacgatgcccagctggatgtattccgctgtttacagccggcagatgagtcatccatagaaagcaccctggtcctgggtcaatatgagggataccgcggcgaacctcttgtaaaaccggattcacagacagaaacctacggagccctgcggcttttcattgacaaccagcgctggaaagggacccctttttacatccggaccggcaaaaagacagggaaacgcgagattgaactggctgtcatattccgcaggccctatcaggaagtagagcccaacatactaatcataaagattcagcccacagaaggcgtctatctgcagtttaatatcaaacgtcccggtgattctgaggatatcataccggccaagatggatttctgccagaactgcagcctgattcatcagctcaatacccctgaggcctatgaacgtcttatcactgcctgtatggcaggtgaacgctcctggttctcacaatgggaccagatagagtttagctggaattacatcagccatctgaaggaacttcacgccgcaaagcggctgccggtgtatccttacaggcccggaacccgtggaccggctgaagcggaccggatgctggaacaatatgggcatagctggctgtaggtgtctgcaaacggctgcaggggcttcaggcgtcttagacagctttaaacggcagcagaccacaggaggcacaatatgtacagtaaagaagaacagaaaaaagcggctgcctggcaggcggccatggaggtagaggataacatggtgttgggcctcggaaccggttcaactgtatattatctcatggaaaaactgtccgaacgaatccgcggcggactgaatgtccatggggcagccacttctcttgagacggaaggcttggcccgccgtttgggcatcccccttatctccctggaggatgcccggaccatacacctggctatcgacggggtggacgctattgacccggatttctattccattaagggcggaggcggtgccctgttccgtgaaaagatcatcgcctgcaaggcccggcgggtcttatggattatggaccagagcaagcttgtacattccctgagcggatgtgtgctgcctgtggaggttcctgcttttgcagttccctatgtggaggaacaggtaagggaagcagggtttataccgaagctgaggataaaaaacgggacagtatttgtcacagacaacggcagccatatcctggatctgacaggaggcgttgaactggattaccccatggcagccgttcgtctcaaatccatgaccggcgtcttggaaacagggctgttcggtgatatctgcgaaaaaatcatagtgggaacggaaaacggaacccaagaacgcttccataattgaactacacagacagaaacaagcgctcccagacacaccagaaaaatcccggactctgcatcatacagaatccgggatcttttaatatacatatctgaataatctcatcagctaatatccaacaatcatcaatcatcaaaccattcatcaatccgtctatgccgactttgcccttgcagctgccttatcctccagcttggatacaaacaccgtgcctgcaagatctcccaggcagttgttggtggtggttcccatgtcaaacaggcggtagaatgcagctatgattcctacaatctctgtaggcaggccaaaagcagttaccatgaccagcagctttacgatgccgcttcccgggataccgccgccgccagtggaaagaatagctgacatcagtatgatcttcaccatggttcccagagtgacaggaacaccgatggtctgactgataaacaggatgacacagccgtacaggataacgctgccgtcatagttcatctgtgatcccaggggtacggtgaagccggaaatagtctccggaacattgaatttctccttggccactttaatattaatcggaatggcagccacactggagcaggtggaaatggtgtatacccacagctccgcactgtcctttaagaacttaagaggattgattcctgcggtcacccagataactgtgcagtaaaccagtaccacatgcaccaggcaggccagataataggtgcctaccagggttgccatgctggtaaagatgccggctccgtactttccgaaggaatctcccatcaggaagaatacgccgataggagataccagcataatcatgttaatcagtgaaaataccatatcattgagcacgttcatgcccttgatagccttctccttgtgctctggattcttcatccttaaaatcgccacgcccagcagaatcgcgatgactacggtctgaaggatattgccgtccgcaaaggtctggataatattggacgagaacattcctgtgaagaaatcagctaccgtgatgtccgcgctgcccgttacttccttggatgccagtcctgtaaaattagctatggtgcccggctttacaatggatgtaaccaggatgccgatggcccaggcaaccagtgtggtgataacataatacgccataatgcggaagctgattcttcccagtgtcttcatatccttctgtgaaacaacacccgtcacaatggtaacaagcaccattggaacaacaatcattttaatacaattcagccagatagttccgataaacccaactttagtcattggttccccgatgacgattcccaaaaccgctcccagcagcatagctgcaaatatctgcgtggataaacctatctttttaccagctatcttcatatgtcaaatccccctttatcgtaaagaatccagttcacgtataatcgctaccgctttttccgtatcctcccttgaaatatctctgtaaaataccagtcttaccttatcctttaacaccggcttgattaataaccccttttcggccgccttgccgcagtactcccctggtgtaaggcccagtccattggcatccaggacaatgatattgctcatgaccttcccatatacctttgtgttctttaaatcctttagctgctcagccgcataggcagcattggcgttatcctctgccagccgctcaatgttgtgcgtgagggcatacattccaggcgctgcaatcacgcctgcctgcctcatggctccgcctaaaagctttctcttgtccctgatcttcatggaaaacgcttcagaacagcataccagggaaccgataggcgcccccagcccctttgagatgcagaacatcaccgaatccacatatttgcacatttcccgtgcttccacgcccagggccaccactgcattgaacatcctggctccatccatgtggacaggaaccccaaactcctttgccagctcatgaatcgctttcatcctctctaacgggacacaggtaccgcctgaaaaattgtgggtattttcgatgcacagcagggcaatctcctggctctccaaaatgcggcgcatgtcgtcaaggtccggcaggttatcctggtccaatttatacgtaaccggttcaagctgcccgatggatgggtcaaataccaccttctcgcttaagtagatatgctgcatctcatctaccatcaccttctggccgggcctgcaataagccagaatagcagatgtattgccctgtgttcctgacgggaacaatacagccgcctcttttcctgtcatctctgccgccaggtcctccagttcattgactgccagatcctctccccttcctttggaatccgtccttccgtcatcccccagctttgcctccagtatggtctccagcatttccctggttggcatactgatagtgtcacttctcaaatctaccatttcattccctccttaatggttatatggtattaataagcaatatttatgccatttttcttctttggtatggaaaaatacgaaaaaacagctatattcagagatatttttactaatatctgcaaaatatagctgttttttgaggttttctgattcaataattaatgtatgggtggaaatatattctagtttatgtcaattttttccatttagcgttttctgttatgtgtcgcagattatatcaaaagcgtcgcacagcgacacgtaagacgctttctgcgacacaagatacgactttgtatgcgatacgatatacagaattatatgtggcataatatacggcactatttacagcattatatacggcacactatctacagcattatatacagcacaccatctacagcattatatacggcacactatctacggcattatatacggcacactatctacagcattatatacagcacactatctacggcattatatacagcacactatctacggcattatatacggcacactatctacggcattatatacggcacactatctacagcattatatacagcacaccatctacagcattatatacagcacaccatctacagcattatatacagcacaccatctacagcattatatacaacacaccatctacagcattatatacgacacactatatacggcattatatacagcattaccactgatacaacactcactatgcctttctatactgcagtgtgccgcataaaaccatggaccgttactccattccgaattttttgatatacctccaaatcgtacttctgtgtattccaagaatccgggcggcttttgttttattgcctccggcctgctccatagcctgggccaaacacgcttcagttatttccctgcttatattctcctgacccggttcctcctgacttctgtttacgcggcctttagttgctttgtaattccctattccattacttcccagaaagccgctgctatttcccctctgctccatttcgcaaggcggttcatagttttgaatcacatagccagcagcttcccctgatatgacagaggaatcgcatatgatacgcaccttctccataaaatgcctcagctgacgggcgtttcccggccatccgtaagaggtaagcaccttctctgccgcaggggtaaggcagcattttcccccgctttccctgagaaacagattggccagatcaggaatatcctcaacccgttccctgagcggcggtatctttagggtcagcacattaagacggtaaaataagtcctccctgaatttgtgctcacctaccagctccatcaggtttttgttggtcgctgcaaatatcctgatattcacgggaaaaacccggtcgccgcccagacgcatgaccttacgctcctgcaaaacacgcagcagcctgctctgaagggacatgggcatttcccctatctcatccaggaaaatggtcccattgtgagccagctcaaagagccccatctttccgctgcgcctggcgccggtaaaggcaccgtcatcatatccaaaaagctcactctccagaattccctcgggaagagccgcacagtttacagcaacaaaaggaccgtttctgcggctgctggcattgtgcatgctctgggcaaacatctccttaccggaacccgtctcacccagcaaaagtacagtcaggtccgtatgggcgtacctctttgcatgctggatgcactgattcatctgctggctgcttccgcatatatccttaaatgaataggtggcctgaaatcccttgatgcctttatccctgattttatgttcccctctggtgatggttcccgcatcattgaaggtgataaccgcacccaatatctctccatttttatatgttaagggaatcatatcataaagaatatcagccccattaatggaacctgtctcctgtatgatttcctctcctgttgccaatacatcatggactgcctcaaaggcgggcagcacctctgttatgggcgtatcgtaaaccagcccgcccggatttggcaggtaaggcttggcaacacggttcatccaggtaatatttccttttatgtcaactgctacatacttttcattggtggtattgagaatagtcttaagctcctctgcctttctggtggcagccttgaccgtggcaatcagcttctctgcttcctgacacgcataggacaatgatttgtccgtcagctcaatgcggactgcgggcagtcccaattctctggcataacgtgtctggataagcccgcccacaatcacgtctaccccttcatttttaagcttctggatttgatggtacgtatcatcttcatccacggcaaatatctgccgtatgcttacattcagaatgggatttaaacgctccaaaccgctgagaaggttgttatagccaatgaccccgatgttccttccatagctgctggcctcaatcagggtgtctgccatatcctcaaaggggatggggatctccaccaccggcaggtccactaccttgcgtatccgcagcgctgtggccccgcggcctaatataacgctgaccccgcgcctgagcatctccggaaccagttccggatcccataccgtgacgattacatccttatccaattttttgaatattttctgtgcctgctccacgaagtcttcgctgaaagcggcgtaccaaatctggctcatggaaagtcctccgattcttcaccacataatcacatcaagctaaaccgtctatatccatatctctgattcgttttaccacatccaaatccgccggaagccactctacatcatcgaactgttccctgttcatccaacgggctgatttgtgctctttcagttgaattttcccttctgcaatcgagcataaatagcaatgcatcatcagatggaactggggataattacattcaactgtcatcaaaaattgttccacgatagcgtcaatacccagttcctcttttaactctcgcagcaatgccgcctggggagactccccttcttcaattttcccaccagggaattcccaaccaccttcaaactctccataacctctttgggtgcctaaaaatgttccatccttatgcagaaccgcggctgccacttcaatcttcttcatcctaatgaccccagctttgtagaattatattaatcaaatgagcctttgcttaaaatcttgttcacaccatcattatattttaatagcaaatgtgttctatgccatgtcaagaagtccctatctggctcaaactctttacgaacattaagtctcttcccttcataaggtctgaggctttcatacaatgccgcatccgttttcgcactgtcagatacgattaactttaaatcatctgtaaagctaatgaaacctttatcaaatgccttatctataagcggagatagacagattccatttcttggattgagccgattatctttgtcctctgaccatggaacaatatgggatgctactaataactcctttgttttaatgccagttacagcacattgaaacccatactccagcttaacttgatttgcaaagactttttgtgccgctcctcttgttttagaactgccttcttgatcctctactctataatttcctccctcctgccgttgataaaacttgacttcctcatccattccactggatatttcttttggttcttggagtaccccaggtttaaaacttaatagatgaataaagtcattcttggtaattttattcataccatattgattaaaaaaatgctcccagttcttcccgcggttacgaaattcccacttaaaatcttccagttcttcctgtaacaaaggctcatcaaaaataaatgcttttgatataattcctttcaccctcttaccctctatggactggattttactaatttttccagctccaaagaaataaaattgtccctttatctcagatgccttctgctgtctgcgatagatgaataagtctccatcttttacctgattataatggtcaatgtcccaacaatacgcttcaaaatcaacatctccatacgcactccccttaccctttgtatcaagtatgaaaaaattggtaccctgcatctctaattcatctctgtataattctaagtttttattcatattgcaccctccccatagaatctcctttatttattcaaatgtctcaaaaaattcagccatagaacagtccaatgccactataatcttttcaagactcataattgataaattccgttttccattttctacagatgcaatataggtccggtccagacctgccttaaacgccaaggactcttgacttaataatagttcttttcttaattggcgtatcctgtttccaacttttattcttatatcaccggaaaactccatctccctcacctcttacaggtaagcgtaacgaaatgtgacttatttagcaacggactataagtcacatatatctttactccataaatattttataccacacgaaatgaaaaatcgttaactataagctcccccgccgcgttcacatcaacacattcttgcgttaatcccttcttgcattcattccctgcaatcgcagctgtccaaaagaaaaaatgcatgacacaccctcaggcccatcatgcattttatatttcaactatacatttcttcccatctcatatgcctgcttcatagccggcgtacccttaatttctcctgcctgccaggcacctgttccataaatgattcccttttccctggctcctgtcagacaatcctgcgtaaatccccggaatccttcaatggtgcgatccatcattttctgttctgtatccgcagcagccactatgaaatagaaatccttattctgaatttcggtatatctgggaactgtgcggtcaatcaatgtcttcatctgtgcatccatggtgtaaaagtacaccggtgtagccagtacaatgacatctgcatccaccattttatccagtatctctgccatctcatccttttgaacacacttatgggtggtgttacagacaccgcatccgatacaatatccaatctttctactggccagaaaaatcttctccgcctgatttccggattcctgtaccccacggataaactcatcgcagagtgtatcagaatttccgcctttccttgggcttgctgatatgactaatacatgtttactcatatgtaaatctcctctcattttgttatctctcatcatcctatcatttggagctaacttcaagtcaagaagtttttattcctgcaaccctaaaatataatattaacttcttgtttcaccaactaaattcgtgattgacgatttcagtcttacacagaatgtgatatgattctcttggtaagtggattcctccattaggaggattattatgcctaagaaaaaagaatatgatcacaagcacctttcaaccagccagcgcattcacatcgaaaaaggattaaatgacggtttgtcctttgctgctattgcaagaaaactagataagcatcccagcaccattgcaaaggaagttaaaaaataccggacgcttcagcctcgcgagaaagacccgaagaagccggccaggtgtgccctcttcaaagagtgcaccctgcgtttcctttgcgataaaaaagactgtgtaaagatgtgtaagagctgctatgatgtaaagctgcaggtttcaaaatgcagctatctgtgttctgaataccgggagcctcaatgtgcctctatatctaaagcaccttttgtgtgcaatcactgcgcaaggcagcggacctgcaataaggaaaaagcctactacattgcccagaatgcagatcaatcctctcaggagctgcttgtatcatgcaggcaggggattaaccaggctcctgccgatattgcaatgcttgatacgcttatctcaccattgcttgcccagggacagtcactggcgcacatttatgcctttcacggacacgagattccttgttccagaaagacgctctacaattatatcgatcagggtgtttttactgctaaaaacatcgatttacgccgcaaggtacgttacaaatgcaagccaagaaaaactggtacaagggtcagcctggctgcaaaagaattccgtataggacgaacctacgagaattttcaaaaattcattcaggaaaatcctgatattccagttgtcgaacttgataccgtagaaggcggccgggataacagcacgcaggctttccttaccatctttttccggaactgttcccttatgcttatttttgtgctgcaagagaaatcacaggaccaggtcataaaagttttcgactatttgacagaaaaactcggtattaaggtttttcaggaactgttccctgtaatcttgactgataatggtgtggaatttcaatttccagaacgattggagtgtgataaaaatggtgaaattcgcaccaaaatcttttactgcaatccgaactcttcctggcaaaaaggacgtatcgagaaaaatcatgaatacatccgatatgtgattcccaaaagccagagtctggatcactataagcagagagatgcctgcgtacttatgaatcatatcaacagtgaagccagagacagcctgaacggctgcactccattcaggctgtctaagatgcttttaaataacaggttacacagacttttatgtctccaggaaatacctggcgaccaagtccacttaaaaccatcgttacttaaaaaatagaattagaatcaagacggaatccactgccgaatttaatcctacaaaaatttggcatgtggaatttagtcttgcacacttacccagatgcctgtttgccatgcttgcacacatgaaaacaggcccctgtaaggtcattgtaactctatttttgtcactcgtaaaccgaaatgaagcgaattaggtgctgcaaaatcaatgttttgtagaaatcacgaattcactctgtaattttacctttattcctgcaaccgtattccttcaaaatttttcctgctgtcatggacacagcacatcgcatatttccagtaatttacaaataatcttcctattcgtattctgattcgtttggctggccctatttccctcctgttcttggtcatccgggttctccccacatacatctacacctattatactgcggcaggatgccgcctcctttatgcaggccaacacgtcctccagctgcgcctctccctggtcccaattggtgattgcacaggagcgggtcaggatatctttatccagggatatataaagaggcagttcggagttcttcagatggtggctgatacaccctggcgtcttcagctcctcttcattgataccaactacccgttccctgtcagcctctgcttccatggagggcggccctgccagataaacccgtttcagacgcgtatttgtatccaaagcagcctgaatccaaccgccgcaggacaggatattcccaaacatgggcatctgcatgtccgtatgatggtcaaacaccagaagctcaaattcctcctctatcttatccagccatattttgctcacataatggtaatttccggaatccaggaagtggattccggagggttccataaggctgattctctccttgatggctgcctctgcctcctcatcacagtaacaattagtgccttgtatatctccaagctccagccatacagcgcccaaatcctggtaaaattcctggttttcatatacgcccgtaaaattcatgatgacaatattgttattcttaagctttttattattaagcataccgattcgcggcctgtcctttcttcatgcttttatatatgctttagaattcttcccaaaaacacttcctcaaagactcttccacaatgattgtatcagaatagccccaaataagaaaccgtctgaaaataatatttttataataatagtaattattattgattttatggaatttatatgatacaatacaaatatcttacatattatcaattatacgtggtaaaatcaaactatagccgaaaaggcaaaagaaacacaggaggggtacattttatggattcaaaagcattttttaaattaagttacggtgtttacattatttccaccagcgcagacaacaaggaaggcggctgtgtcatcaacacactgacccaggtcacatcttctcccgccaggttatccattgctctcaacaaggaaaactatacgctgaagctgatagagacatccggcaccttttccgcagcggtactttccgacgatgtggaaatggacctgattagacgtttcggctttcagtgcggcaaggatgtaaagaaatatgacggcattccacagggacgggacagcctgaataatccatatcccacagaaggtgtctgtgcccgtttcacctgccgtgtagtatcctccatggatgtgggctcccatatgattatagtgggcgaggtagtggaagcagaagtcctggattcccagacaccggcgctcacctattccaattaccatctgaagaaaaacgggaccactccgccaaaggctccttcctatcaggcagacacaaaagaggttacgggatggcgctgttctgtttgcggatatattctggagtccgagacattgccgcctgactttatctgtccggtctgcggcaaggatgccagctattttgtaaaactgtagcccccttaccattatctgaaccattgcaaaatacccctgaaaacagctgattcatacccataagctgttttcaggggtatttttatgtccttgggatatatcctacttctgatcggatttattcctggcccggttttcttctttatcattggtaacattgccgtccccgctgaccggtatggcatctcccagataggtgggcttaggcattacaatggtataaatcaaatccttgggcctggccagcagttctcttaagtccctcattttctggccgccgtactgcctgggatctgactctacgccgtatgcctccatccccatggcctgcgccacataaagagcccggtacatgtgatagcgctgcgtaactataataatcttcttcacctggaaaatatccctggcccggtacatgctctcataggtggagaagcccgcgtggtccataaaaatatccccggaaggaatgccctcatcaatggcatactgcttcatccggtttacctcgtcatagttcttgcgcccatggtccccgctcatgagaaggcggtcggacacaccgtcctcatacagctctattcccttgtccagcctgtcccgaagcatgccggaaggcgtaccgtccggcctgacactgcagcccagaaccatgatacagtccacatctccaagagctgccgcatcatctgcactgatgatattcggtttttccttcctgatcatgtacagatttatcaggaacaggaacaggcatcctgccagtcccaataccagaagtatcttaaccgcttttttcagaatcgcttttttatccattccactcttccttctcttacggagcgccgacggggtcaaaaaagccgctcttcccggcaaaatgcagagatttgcggcttttaatgcgtatgtcaggtcaatccttatttaacagcaattgcctcgatttcacacagaacgccctttggaagggtcttaactgccacacagctcctggctggtttggatgtgaaatacttagcatatacttcgttaaatgttgcaaaatcgcccatatctgccaggaagcaggtggtcttaaataccttgtcaaagccgctgcctgctgcttccaggatggcgccaacgttcttgcagctctgctcagcctgtcctgcaatgtcctctgcaacgctgccgtctgccggatttaccggtatctgaccagatgtgtagataactccattaacctcaaatccctgggagtatggtccgattgcgcctggtgccttttctgtgctgattacgttcattttaaatcctccttgttcttaggggaaatgcccgtacaatatgtattccccattatattgattttcattctcacgcgacatgcgcgaaccccaaagttattatatcggattattggaaatgttgcaaggtaaggctggaattcttctttgtattttttgcaatactgttttttcccaactcatgcctgtgatggagtttcttcaagaaacagtacactgttttcagcacaatgcacagttgcaagcttatgttttgtatattatatacgaaaaataatttaagtattgatttattttgtatgatgtgtttataattaatctagttaacagttaatctacttaacagtaaatatgcttaatttaaaaagaggactattatgttatacgattttgacacagtcatcaacagatggcacacagacagcgaaaaatacgatggtttaaaaaaatttgcccccaaagcccctgataacagcattcctctctggattgccgatatggactttaagacagcaccggaaatcatagccgccatgcacagacgggtggaagaaggcatctttggttatacggatatctatgatgcatcctattataaggcggtttgccgctggatggaaaaacgtcaccgctggcgcattacaccggatgaaatcgtggtggattcaggcgtggtgcccgctctgtctcatgccctgtcgctgattgccaggcccggagacggcgtcatcatacataccccggcctataaaccattttttaattccatcaggaatacaggcatgattcccgtatattccaggctctgttacagccatggccggtttaccattgattttgaggacctggaacagaaagctgaggacgaaaacaataaagttctcatactatgcagtccccataatcctaccgggcgtgtctggagtcaggatgagctgaggcatattgtggacatctgccaaaagcatggcctgttcatcatctgcgacgagatacacaatgacatactccgcccaggcatctgccatacccctatagccagcctgtatccggatacaaaacgcctcattacatgcactgcccccagcaaaacctttaacctggcaggaaaccacttggccaacatcattataccagacccagatatccgtgaacgttggaacagcctttatcactacctgcctaaccccatttctgtggcagctgccaccgcagcctacgaggaaggggagccgtggctggatgagctgaatcaatacctgacggaaaccttccgccatatggagacgttttttaaagccaaccttccttccattgatttccaaactccggaggccacctatctcgcctggattaacattgatagcctgggctcaaaccatagtgagatcgaaaaccgcttcattgaaaacggattgataattgaaggcgggaaccagttcgtggaaaatggagccgggttcatacgtctgaatgcagcagtacctcattccaccattgatactttattaaacaaaataaaccatatatttaactaaggaggactaatccatgaaaaaaagaaatctaatcctgacagccgcgttatttgccatgaccgcttccctggcagcatgcggagggcagaagcccgcacagacacaacccgcagcagacactgccgcagagtcaaagggtggggacaaaaaggaggaggcaaaagaagaaccaaagtcagaagagactgccgctgcttccgctgaaaaaacgcggtatgaaaaaatccttgaaagcggtgtcttaaaggtaggtacagaaggcacctataagccgtttacgtatcacgacgacaacaatgagctgtgcggatatgacgtagaggtagccagggccatcggcgaaaaaatgggggttaaaaccgaattctccgaaatcacctgggaaggccttctcacctcattggacacaggaacggttgatttggtactgaaccaggtaggtgtaacagacgagaggaaagaaaaatatgatttttccgacccttacctctacagttacattgcgctcattaccaaaacagacaacaatgacatcacggattgggacagtgccaacgggaaaaagacctcactaaacgtatccagcaactatgcgttgattgcagaaaagtataacatggacatcactgcctccgataccttcagcaaggacatcgaattattactggcaggaaggactgactgtgtcatcaacaacaccatagcatttaacgacttcctgacacagaaacccgatactccaatcaagattgccgctgttcaggagcaggctgacacagtggctgtaccgattcccaagggaaacgatgatcttgtggaggccgtcaacaaagcaatcgcggaacttcaggcagacgggacacttaccgaactttccaacaaatatttaggtaaagacttctcaaaagaacttaccctggaagaaatccagcagtagcatatcaggagggtgaatgaaatggatgcacgttcaatcgaaatattaacctcatcattttggcctattttaaaagcgggaatctcttttacgatacctctgacattgatttcattcgcccttggaacaacgttagctgtattcgtagccatcatccgcatatccaaggtgccggttttaaacaaaatctgtgagttatatgtctggattatacgcggtacccctctgcttgtgcagttgttccttgtattcttcggtcttcccaaagtaggtgttgtcattaatccaatgccttcaggaatattggtttttaccttaagcatcggtgcctacagttcagaaataatcagagctgccatcctgtccatacccaaaggacagtgggaagccgccatgtcactgggaatgagctatccccagcagcttttaagaatcatacttccccaggcttttaagatatctgtgccgcctctctttaacagctttatcgccctagttaaggacacatctctcgcagccaacataaccattccggagatgtttctgactacccagaggataactgccaggaattatgaacctcttctcatgtacatcgaggtcggatttatttatcttatattttgtacggtcctgaattatgtacagaaccggatagaaaataaacttatgctgactcctacggataagaaaagaatcaaagaaattacggatacgcaggcctagggaggtgccatatgctgcagattaaacatttaaacaaatattttggagaaaatcatgtactgaaggacatcagcctggaaatcgaatcgcacaagaccatggctatcataggttcctccggctcaggaaaatccacattgcttcgatgcatcaatcttctggaaacaccggattcaggaaccataagcctggatggaaaagcgttggatttttccaaaaaacttcccaaacatcagaaagccgcctttaccaagaaaacaggcatggttttccagagcttcaatctctttccgcacaaaaccgcccttgaaaacatcatggaaggacctgtgactgtgttgaaaaaaagcaaggccgaggcctgccgggatgccattgagcttttaaaacgggtaggtctggaggataaaaaagacagttatccccaccagctttccggaggccagcagcagagaattgccattgcaagggccttagctatgaagccggaaatccttttgtttgacgaacccacaagcgctcttgacccagaactgggagccggcgttctgagcctgattaaggaactgtcacgggaggattataccatcattgtcgtgacacataatatgtcctttgccagagaagtcagcgaagaagtcgtattcgtggaaaaaggagaaatcctggcaaaaggaagttatgacgagctggtaaacctgcataatgacagaatcacacagtttttaagctatttggattagggaggcattcaagatgaaccgtaaaacttcaaagaatatcatctgctttggctcgcttattatggacatctccatacgctgcgataaaattccggcaatgggcgaaactgtctatacctatgaggattataatgtaaatccgggaggaaaaggcggcaaccagtcggttgccgctgccaggtccgggggcagcgtgactctgattggaagaattgcggatgacgattatgcccaccagctgattcacagttttcaaaaagatcatatagataccagccagcttatggttgatacggattccaaaacaggtgtggctttcgtatgggtggatatggagggacataataaatgtgtctgttcccttggtgtcaatgccagagtaacctcccaggatgtacagtcctatgcccatctgtttacagaccgcagtatagttatgactaccctggaacacagcagccaattactggatgaaatctcccttatggcccggcagaataactgcattttaattgtagatccgtcctccaaagactactctaagctcacgcctgaaattgccggtcggatagatatattaaaacccaatgaagtagagacagaaatgctgaccggtatcagggtggaaacagaagaagatgcagtacaggccatacatgtcctcaaagataaggggataagaatgcctgtgatttccctgggcagccgtggtgttatctatgaatacaaaggcaaagccacttctgtgaagggtctccgggtcaatgccgttgataccaccgcggcaggtgatacattcattggcagtatggcagcaaagctgtcacagggatattcatttcaggagtctatcgactatgccaaccgcgccgctgcatactgcgtgcagcacaggggggcgcaaatctctattccttttgaggaaaatgtattataataaaactatatattatttttacaagccaaagggagagagagcatggataataggagatatttaatatattgtgatatgatgacagaattgaaactgacaaatcagctaatgaacgagtatgacagtctcccccatgactatggaaatgccgtcctgtaccagtcagaggcccatctgattcaatgtataggccagaatgacggcattaccgtgacagaggcgtccaaactgttgaaaaaaacaaaaagcgcctgttcccagatggtaaaaaagttagttgggaaaaactgggtcaagcagacccgcaatcagaaaaacaacagggaatataaacttcatctaacggaggaaggtctcattatctacgaccatcatgaaaattttgaccgtatgtcttatgagcacaactcgaaagagctgtatcatttcacagatgaggaattacagctgtacataaaaatacaaaagagaatgaacgaactcatcggacttgatgtggagagaagctacaattattttaaagcagatatttcctgtatcaacgaaaggtaatataattatgggtaaattaaaagatgtttttaaggtggataaaccaattatcggcatggtacatttaagaccgcttcccggttcccccaaatatgacccggtaaacatgggaatggataagataatttccattgcgctggaggaggctgccatgctggagcaggccggcgtggacggagtccaggtggagaatatgtgggatatcccctatctccgcagcgaggatatcggatatgaaaccgccgctgccctggcagtgggaatccatgcagtccgcaataaagtctccatcccggtgggagctgaatgccatatgaacggcgccgactgtgccatggcctgcgcggtagccgccggagcaagctggatacgtgtattcgaatggtgtaatgcatttgtatcccaatccggttttatcaatgccatgggagccaatgtatcccgtatgaggagccgcctgaaggctgaccagattttggccttgtgtgatgtgaatgtcaaacatgggagccattacatcatccacgaccgcagcgtagcggaacaggccatggatatcgaatcccaggacggtgacgcggtcattgtcacaggttttgatacaggtacccctccatctgtggaaaacatatctaaatgcaaaaaatccacttcgcttcccatacttataggcagcggccttaacagcagcaatgtaaacgaactactgacagcagcggacggcgccattatcggcagctggtttaaggaaggaaataattggaaaaatcctgtgagctatgacaggacaaaggaattcatggataaggtaatcgccttgaaacaagcgtaaaaggggcatgatacgtcaaatacgcactgaaaaaaggagggagctgcacgcagcatccctcactttctatatttcttacttggttcccgttctattacttcttatcctgcctatttttcagcactctgccccagatgggcaagcaaatactccttggtattcctctgaggttcctccaataccatatctaaaagcctggtcagcgtattgcccacttccctgcccggcttcacccctgctcccataatgtcatggcccgagacagccagggtcttcaggctgatgcagtccctgttactgcggatttcctctgtcaggtccctgacctgacacagccactgggattccctgtcatcagatgcatcctcagatagacacatcttaagcgtgagcaaatcatcaaacagttccggctccatctggctcatggcacggcggatggatgccctggagggctccggctgctttgcgatttccttcatgccttcctccttgccatgcttcaagcagtcttcccccccatcctcagctccaacctttttgccctgccactccaccagggttcttaccctgtaggaggtatcgttgtccagctttaaatccttaagtatgcccgctgcctgggaagcgctgcactcccgcaaaaaggcggcccagcgcatatgctttacagccggaactccggccggaatagacggcacagcccagtcccctgaatccgcggcataagccccgtgaaatttctctgacacaaagggactgatacccgtctcatacaccagcgagatataatccggatgggaactcagaagaagcttggtcagctccacctgaatccgttccttactcacatggaccatgttaggcgcaattaccttaatagcctcataggtgcgctcctctatggagaatcccaattgggccgaaaaacggatagcccggaggattctgagagcatcctccgtaaagcggtccatgggttcccccacgcaccggatgatgcccttctccaaatcctccacacctccgaatttatccacaaatcccgtatgactgttataagccattgcattgatggtaaaatcccggcgttttaaatcctccaccaaatccggagtgaactccacgctgttgggatggcgtccgtcagagtattctccgtcaatgcggtaagtagttacctcatacccttccttccccatcatcacagtcacggtgccgtgctgtatgccggtatccacagtgcgccggaatacctcctttacctgctccggcagggcgctggtggtgatatcccagtcccccggctccctgcccaaaagcatatccctgacgcatccgcctaccacgtatgcctcgtatccgtgttcattcagtttattaataatctcctctgcgggagccggaattctgatttccatgtctgtctgcttcctcatactatatccgtttaatgattgacattgccacggtcttattttatcagtttttcctgtgcttttccagaaatatttttaaccgcgtattataaccatattaaccatatattcttcgtatataaaaaacggcagatacaggtccagtcccgcatctgccgtttctatacacatctttagtacgccttgccccaataaaccatcttcttcgccggtttcccgcagcaaacacattgatcggacaatttctcctgctcaaagggtatgcatctggatgtggctccggccacctccttgattttctcctcacactccaggcagccgcaccacatggcttttacaaagccgggcttgttgttgacagtattcacgaattcatcccagcctgcagctgtgtaagtgtgggcatccctgtgcttccttgccttctccagcatggcgtcatggatggtatccagcatttcaccggctcttgtctccagctcatccagggatacaaagctcttctcatggttatccctgcgcaccagcacagcctggttcttctctatatcctttggccctatctccacgcgaaggggcacgccgcgcatctcgcagtcagcgaacttccagcccgggctcttgtccgtatcatccacctttacagcgtatcctgcctttgtaaggcgctccttcagctcatatgccttatccagcacgccttccttctgctgctgtaccggcaccaccataatctggaccggcgcaattctcggaggcagcaccagaccgttgtcatcgccgtgcaccatgatgatggcgccgatgatacgggtgctcacaccccaggatgtctggtgtacatactttaatgtattatccttgtccgtgaactgaatgtcaaatgcctttgcaaatccatcgccaaagttatggctggtacctgactgcagggcttttccgtcgtgcatcagggattctatggtgtaggttgcctctgctccggcaaacttctccttatcggttttctgtcccttgatgacaggaatagccagcacctcctcacagaagtcggcatacaggttcagcatctggattgttctggcctcggcctcctcggctgacgcatgggccgtgtggccctcctgccacaggaattccctggagcgtaaaaacggacgtgtggtcttttcccagcgcacaacagaacaccactggttatagactctgggaaggtcgcggtaggaatggatatcctttgcgtaaaaatcacagaacagggtctcagaggtaggccttacgcacatacgctcctgaagttcctccagtcctccgtgggtcacccatgccacctcaggcgcaaatccctccacatggtccttttccttctctaacagactctccggtataaagatgggcatgtatacgttctgcacccctgtctccttaaaccttctgtccatctccttctggatgttttcccagattgcgtagccggccggcttaatcaccatgcatcccttgacgctggcataatcgcaaagctccgccttctttaccacatccgtataccactgggcgaaatcctcatccatggatgtgatggcctctaccattttcttgttgtctgccatgattcttctccttttcgttatttacattgacccttgcatatctttcattatgaaataaaaagagccatccaatcccctgtgccgtgtgcacaagggaccgaatgactcggcggtaccacccttattaaccttcgggcttaagccgcccttatggttctctcatcatccgttaacgccggacatacgctgcattcatcatacaggactccagggtgggttcagcatctgccaaccgtaaggacctctcacctgcggccctctctctgtgacgtgcaatcacgcttactgttccctttccatgtcatatctatgaattggtcatttctttatgtaagaatgattttacgtcagtttccggactttgtcaaccacagaatcgccatataacgcttccgcggcggacggataacacctttccccctttttacctttaggagacaggaagtatcttaccctaaaattcaatcagcatgggctgtcccttatcaggaccttccagggattttttcaccatttccctaacaaagtcctccgccattgccatggttgagttattggcaatgtcaagctttattctactggctcctctcattaaatctacgtttgctccggttgtggagagataactgcatgctgtcagttcaaaatctccattgggaagctgattgatgtgtgcttgtgcctgaatcataattgtgactcctttctttcatttgatgagccaactatatcactcccaatccttaattgttcctttttggcacagatggcatacaatccgtcatagatggcctatttccagtttctatctgatccctattcccctatgtctcagtttcttcctccttcgtccacgcctccaccatatcctcaatcagcagcaaacccagcggccccagtataaatccaaaaaatccgaataactccaatcccacatacacagacgccagcgtctcaaggggagacagccccacctgtccgcccatcatccgaacctccagaatctgacgcacaaaataacacaccagataaatggctgtgagtaccagtgcctgtttccagtcccctacagccagccgaagggcagcccagggtatcagcaccgtgccggttccaaatatagggagtgcatccagtataccgataccaatacctgccatgatataataaggattgcgaatcaggaacattcccccgatacacagccctgtagtaataaaaagaatgattccctggcttctgaaccaggcctttcctgtctgtaccaggcggcttcctatcatattgaattccttgcggaaggcggactggtcccggcggtcccgcaggtcctccatttcctgcaggcttaatatggcggccaggaacaccaccaggcttacgatggcggcttttgccagacagctgatgacagacatggagttagccatgagaaagggcatggcagctgtcttgcatgtatctaccatatgatagagcatgtccccggccatgtcggccacacaccccggcctcagccccatggcatgctccaccctgtggcagtttcctgtgagccacaaatcaaactgttccagccaaaccggaagctgcaccataagcagttttccctctgcgcacaatttcagggcgcctctgtagagcaccgtccccagtacggacagcacagccagaaactccacgccgcctatgacgccgatgggcatatggtaccgttttccctttaccgtaaccctcatccggtaggacaggaacctggccgacggccgcagcagaagggccaggatataacccacgaaaaaaggagccacgaggggcagcagatatttaaatcctgcatacaccgctcccgtggttcctgttataattaataatttcttcagtttcttacccggcttttccatggactcacctgtttctgattcgtacttcatttgtaccctcatagtatgagccgatgaccggaaaatattctgtttcctatgtacaaatcatgccggtaaattattcctttgttaccaggctgtccactgtatcctgtgttaccagctggttgtccaggattacataaggctcaacctgcttgccttccagataatcataggcagtgttaaggatggccttgcctaagaagaatggcggttctgcgatggttgcgtcaaccttgccggccttcattgcatccaatgtgtcgtcgatggcgtcacagccgatttttacgatttcatcggttctgcctgctgcttccattgcctccaatgcgcctaaaagcatctcgtcatttgcagcgtaaagtccgtcgatttcaggattggcctgaagaatgttctccataacgctcatgcccttggccctgtcaaaatcagccacctggcaagccacgatttccatgtccgggttgtccttcatcacttcgttgaagccctgggaacggttctgggcaacgttggttcccatgatgccctgaatctcaacaatctttccttttccgcctaatgtatcaaccaggtactgtcctgccatgcggcctgacttgatagcgtcgtagccgatgtgtgaaataacctcgccgccgttggcctcgcggtccatggtaaatacaggaattcctgcctcgttgcacgcctcgatggaggatacgatagcgtcggaatcacaagtatcaataatgatggcatccggcttctttgtaatcaggttctccacgtccttcatctggatggtgggatcgtcctgtgcgtcggtaatatacagctcaataccgtgctcatcagcggccttctggacaccgtccttaacatccacaaagaatggattggtctgcgtgttcatggcaaggccgataacatatttctttccgcttccctcttctgaaccggcattttccgcctcagctgaagtatcctttgcctcatcctttgcttcttccttggactcttcctttgccgcctcggtggtggctgctgcggtagtttctcctgaacctgagctgcatccggccatcagtgaacacgccattgccagtgccagtacagttgccccaatttgtttcctcataatacaatctccttttcttaaaaaaatattttgtaacggttccgccgtttcatggataaaccggatgaaccggcagaaccgcaggtaccttatccttttggcccgtttccgggttttactgctctgtatttatactaatttgtattaactctgttctctaactgttattctgccttagccgacaaatccttcaccttcttgtccaccaggactgcaatcagtataacagcgccctttacaatgttggtggcatgaggatttacgttcataagcgtcaggatattatcaataatacccataatcatggcgcccaccacagtggggagcacaaagcccacgccaccgcttaaggacgtgccgcccaggataacagcagcaatggcgtccatctcaatgccggtgccgctggtggactgtgccgaaccaagccttgctgtcagaatcacgcctgcaacgccgcacataagaccgttaagggtataagccatccactctgtaaaacggacggaaatgccggacagacgcgctgcctcccgattgcctccaaaggcatagatgctgcggccgtagctggtctgtgtcagcacatagtgggcaatgaggaagaggatgataagaatgatgacaggaaccggcactccggccactgttcccttgccaaaaaacttgtaggcatccaccttaatgggaataggggaaccttttgtatatacaagaatgcatccgcgaagaagggtcatcatgcccagggtggagataaagggagggatctcacacactgccacaaagaaaccatttacggcgccgcatcctatgcctacggccaaagccaccaaaatggccgctcccgcatttcctgtggattccaggataccggaggccagaacgcctgccagtcccagaatggagcctacggaaaggtcgattcccccggtgagaatgacaaaggtcattccgcatcccacgataccggccactgtaatctgcttaaacacgttaaacaggttggccacgcttaagaagctgggggacaatatggttgcaaatacgcagattaccagtaaaatcagcacggagcggtagatattgagctggccgattaattttttcttatttacactattcattttcactgacacctccagatgcatgggctaagataatttcctgattcatctctgattttggtatttccaggaccgtatggccttccctcatgatgaccacccggtcactcatgccaataacctccggcaggtccgtggaaatcagtatgatgctttttccggccctggtgagctcatccatgatttgataaatctccgccttggcacccacatccacgccgcgggttggctcgtccagaatcagtatggacgggtttgcttccagaaccttggcaaataccaccttctgctggttgccgccgctgagcttaccggccagctgctgcaggctgctgattttaatgttaagccgcttaacctgtgcgttaatctgtttggtctccagcttcttatccagatgaataaaatgggttatcttatccagcgatgacagggaaacattttccctgatattgcgtatgagcaccagcccttcctgtttcctgtcgtcggacacaaatccgattcccgcctttaaagccttcttggggctggaacaatctttcttttccccgtttatgtaaatttctccggaatccatggggagggctccgtacacgattttagacagctcgatggtgcctgatcccagcagtccggccacccccaggatttcacccttgtgaagcctgatattcacgttgtggacgcctttgccgcagatatccttaagttcaagtacggtctcgtcctgcgtgtaatccctctcaggatacaggttggtcacgctgcgtccaaccatcatggacaccacctcgtcgtaattggtgtcgcctatgtccttggtcgctatgtattttccgtctctgaacacagtcagacgatccgatatctggaaaatctcatccattcggtgggaaatatacagaatggaaatgccctccgccttaagctctgcaatgattttaaacagaatacgaatctcctcgtctgtcagggcagccgttggctcgtccatgatgataacctttgcgcctatggtcagacactttgcaatctccgtcatctgcgattccgccacagacaggttccgcaccttggtgcggctgtcaaacttaaggcccaaacggtccagctcctcctgggcatccttgtacagctttttccagtccactgctccgtagggtgtcttaggaagccttcccagatacatattttccgccacagacaggtcccgcaccatgttgaactcctggtatatcatggcaatacccttgcgctccgcatccttggtggaatggaacaccacttcctccccattgacatacatgtgtccggaagtatatccctgagcccccgctataattttcatcagggtggacttgcccgcgccgttctcaccgcacagggcatgtacctcgcccctcctcacatccagatggactccgtccagagctttaactcccggaaatgtcttcacaatcgaatccatctgcaatactaatttttcttccatgttacccctcccttgctgctaagagttcctgaacatgcccccttatgagagcagtatcagtaagcgcatcccgccgataaaatcacgttggtgtacccggtaaattcaccggtaagtacaatggcctttgcatctttgctgcgctccttaagctctgtgtggggaatatattccaccggaagcccctggggcagaaggtccagcgccttcttgtggaaatccggcgtcacggtcagcgcctcgtcagcaaacacagctccctccaccacgatatatttgagtatctcctccagaacatccagataggccggatcaccgggcctccagcccaggtccacacgctccactccctttggaatgggaagtccggcgtccccgataataatggtatccttatgcctcagctccgccagcaccctggccagctgcggatgtaatattcctgtttttaacatgtctgtctccccttctactgattatgattctacatattatgattctaccgattatgattttcctgatgatgcttttgacaatggcgcttctgattgcggcccttttgtctgcagctcctttgaccgtggtccatctgactgtgttttttttgaccgtggtccatttgactgtgattcttttgactttggttcttttgtctgtagttcctctggttgcggagctttgattgtgctttgacaatacctatgttaagtgtctgtgcgtcagcaatccgcggtctgacaatttgcagccatgaatgcgtcaatctcctccctgaccggcatggagggcgtagtaccgattttctgtacagacagggctgccagggcattggcaaaatcagctgcctcccacaaattctttccctctgccagcgccgccagaaggccgccgttaaatgcatcccctgctccggtggtgtccactgcctccaccttataagccggaatgattcccttcttctctcccgtgtttatatatacgcctcgatgccccagtgtaatcaatacattctttacccctttggagaagaaccagtccgctgccttgtccgccgcttcctcgctgtccaccttaatgcctgtaagaatctctgcctccacctcattgggggtaatcaggtcaattttgcctaaaagctcatcactgacaggctgcacaggggcggtgtttaaaatgaccttaacgcccttcctgtatgcgatgtccacgatgcgctccacagaggacacattggtctccagctgtgtcagcaggtattcggaccggcccaccaaatcctccagggaatccacttcctggtccgtaatggtattgcaggccccgagtataaccacgatttcattctggctgctgttctcatccaccataatcagagcgcatcctgtctccgttgtctcggaatacaaaacccttcccgtatccatgtgaagctcattcatggtattgagggcaatatcggcaaacgcgtcccggccaagctttgtcaccatggtcacatccgctcctgccttgtgggccgccaccccctggttgaatcccttgccgccgggtcccatcttaaatacggtccccttcacggtctcccctgctgccggcagatgcggtgtcctgcccatcaaatccaccacaaagcttccaaatactgttactttttttcccatatgctccataatatgttctctctccttaatccatcttgccggcgcgctccgtacacgcttcataacaatcctatggccggctccccatcggcaattctgcgccggcagtttcctatcgacatttttccattaacatatttccaccggcagacaatctaaatcagtacaatcccgttgccggctccgattctgtccgcccctgccttaatcatagccgcagcgtcttccggtgttcggatgccgccgctggcctttactctggcactgtctccaacggttctgcgcatcagggcaacgtcagctgccgtagctccgcctgtgctgaatccggtggaagttttcacgaaatcagcccccgctttcactgccagctggcaggcccttaccttttcctcatccgtcaggaggcaggtctctatgatgacctttaccactgcgcccgcagaggcttttaccacggcccggatatcctcctccacaaaggagtcatccccgtccttaagggcgcttatgttgataaccatatccacctcatctgcccctgcctttacagcctcagaagcctcaaaggcctttgcgctggtaagcatggctcccagaggaaatcccaccacacagcacgtctttacaccgctcccctttaactgctccgctaccagcggcacaaagcaggtattgacacagacagaagcaaatttgtgttcccttgcctcactgcaatatcttatgatagtattcttactggcatccgccttcagcatcgtgtgatcaatcatgtgttcaattcccattttcattctccttttccgtttgaagcttttacaggttgaaattgtattatgtaatttctgtaaccggttacacatttctgtaaaaaaatatgataggctttacatttttgtgtaaccggttacagatttgtgcagaaaacaatctgactggattgtcaggttgttttcctgtgttctgaaccccgcaggattaccttgtagggaatggtaatccgctttcctctctgacggctctttcctgaatcttcaaagcactcctgaagaagtctcatggcttcccgcccctgttccctggcatccctgtccaccacggatatcctgtaatcgatcatccgcagggcgtcaatgtcatcgaatcccatcagtgaaatgtcccttcctatctttaccttgtgttccgtcagatacttaagacatcccagagtggaaaggttgttggatgtaaagatggctgtgggcgcttgcgcaagtcccaaaagccgtccggtacattcgtatgccttggcaatcttaaaatcgccgcaggcaacatattcctcaggaacagccagtccgctgtcctccatggcctgcagatagccctggcaccggtccttacccggcttggaggtctcagggccggttataatggcaatcctctcatggcctgcctttattaactccatcactccgtcataggatcccttctggttgtccacgaatacgccgtcaaactgggcccctttcacatcacggtccaccagcaccaccggtatgccggactcctccaatcggagcaggtaatccctggtaaccgtatctgtctctgaaatcggcgttatgattacgcccttcagtctctggctttccacgattttcaaaaaatcatgttccttgtccaacgtctcattggttcccagaaaaacaatattataatggtacgattcagccacttcgctgattccgcttataaccttggaaaaaaactcattctcaatatccgggatgatggttcccacgcttaagctgtcctgaatgctcaggcttctggcgatggcgctgggtacataattatactcctccactgccctaagtaccttttgcctggtctcctctttcacgtatcctgaattattgagaaccctggaaatcgtagcggaagagacgcctgcccggcgtgcaatttctttaatgttcatgacccttcccctctctttttcctgtaaccatgccagcataatctgtaaccggttacatatataatactaccacatagattgttaaatgtaaatagtttttatcattttttcacaataaagtcaataggaattcagtggaaataatttaagatggatatcccggctaaccccctataggatacatacagaaaatctgccaaatggatcggatgatctggctgttatacagcagtctatactgctttaagtccgcttatacagtcaaagggagacagcccaaagactgtctccccttttaatcccaactcatgaaatgctaaatctataaaaatatcaattcacatcttaatttcagtatgtaatgacatcacctaaccgctgctatgcaaagaaggatataataagagccactacaaatcccgtaccgcccaccagcgtctccatgacagtccatgtcttaagggtagtcttttcatccagccccaccagtgatttcacaagccagaagccggaatcattaaaatgagagcacaccgttgctcctcctgccactgccgctgtgacacaggccaggtacagaggggacagggttgcaatttccggcatggccgcgatgatgccggctgccatggtcatggcaactgtagcagacccaacagaaatacgcaccagagcagccaccacaaaagccactaccacaatcggaagagaggcagatgacactgcattgccaatcacatcacccagaccggaattctgcagcatgaaccgcagcacgccgccgcaggccgttaccagaagaatcaggcccgtaggctccagagactttgtcagtaccttttccagctcctcgttgctgtatccgtgacggtatcccagaagaaacatagccacaaccgtcgctatggtgagagccacaaacggctcacccaggaatcctaacaccggctgtacagaggcaagggcaggaaccacctttgcaatggaattcaggataatgagaaccagcggaatcaaaataattcccacgattgttccgaactttggaagctttgattcgtcaaaatcctcctggttggcaatgtgttccggaaccggtatatcgtacttgtttccgcagatagtcccccatatgggaccggccactatcatggcaaaaataccgcacacaatacctaccataatgacccagcccaggtccacgcccagcatggtagccaccagcacgggccccggtgtgggcggaataaatgcatggcctaccgccagaccggccagcaggggaatggcatagaacagggaggagcgtttggttctctttgcaagagaaaaggcaagaggaatcagaataatgagtcccgcatcgaagaataccggcatggctatgacaagtcccgtgattcccaaagcccaggcagccttcttgtcgccgaatttctttaccatggtgactgccagtgtctgagcgcctcctgatatctccaatatggaaccgaacatggagcccagacccacaagcagggcgattcccttaagagtacttccaattccttcatttacagagcttatgatatccgtaaagggcatgcctgcaatcagcccgatggccactgcgcctaccagaatggaaatcattgcctgcaccttaaatttgatgattaaaagcagcagaatcaccagccctgccaaggccgcgataatcagtctggtcggatccagagctgcagctgttgttgttgtcatacttattaccctcctataatttcacacaatatccctatttccgctgatacttccatctaatatttctcgttcatgtttcaacaatagctccggtccatacttcccacaaatatttcccggccagtttccggcaatcagaccatgtatccgcccttcatgggtgatacggcatgctcggaataaattttaagtacgccctttttatacttggcttccctgggcttccaggcttttctgcgctctgcaagaatacgttctacctcttccttgggaagttcctctcccttcacgcctatgatttccagaacgcgctccggtatatcaattctgataaggtcatcctcttccaccagggcaatgggtccaccgtccgctgcctcaggtgatacatgtccgatggctggccctttggatgccccggagaacctgccgtccgtgataagcgctatggtttttcccagctccggatcagaggagatggcttctgtggtatagaacatttccggcattcccgatcccttaggtccttcataccggataaacacggcatctcccggctgtatcttcctggaaatgactgcctcaatggcgtcctcctcacagtcaaaaggttttgccttcaggactgccttaaacatctcctcaggaacagcagaatgtttcaccacagaaccctccggcgccagatttcctctcaatatggccacggttccgtctgtcccgatgggtttctcaaaggtcctgataacatcggtgcgcttcagcccccattttttcagatatccgtcgcacttgtcgtagaatccgccagccttaagctctttcagattttctcccaaggtctttccggtaacagtcatcacatccaggtgcaacatggactttatttcctccatcacagcgggaacaccgcctgcatagtagaagaactgtgccggccattttccggcaggtctgatatccagcaggtaatgagcccccctgtgcatacggtcaaatgtgtcagcgtcaatctccagtcccagctcatgggcaatggcaggaatatgaagcagggaattggttgaaccggatatggcagcatgcaccataatggcattctcaaatgatttcatggtcacgatatcgcttaccttaagccccttcctggccagttccatgacctggaggcctgccttatacgccatttccttcaaatcttcgcaggttgcaggcatcagcgctgagccgggaagcatcagccccagagcttcggccatgatctgcatggtggaggcagtacccatgaaggaacaggctccgcaggatggacaggcattgtgcttataataggtaagcttttcttcggtaatctcacctctctggcacatggctgaataggcgccaatctgttccagggtcagcaggtcgggaccagcatccataacgccgccggtcaccacgatagacggcatatcaagtcttgccagtcccatcagacaggcaggcacggatttgtcgcagcttgcgatgaacacgcctccgtcaaaccctgtggaattgccgtgaatctcaatcatattggcaatcatatccctgtgcgcaagtgaatagttgataccgtcatgtccctgggcaatgccgtcgcatatgtctgtggtaaaatacctggctccctttccgcctgcatccgcgattccccgcatagcttcattcacaaactggtccagatgggcgctgcccggatggctgtcgccaaatgtactctcaaccataatctgcggtttatccaggtcttccaccttccaccccatacctatttttaaagggtcgttctccggtgccagcgctcttactctttgactgttcagttccattataatgcctcctctttttgctttacatctgacgtctgacttctttatggttttatagtagcatttttgaattattctttcaagtcatcagacttgttttctactatattgtcaaaaaaatttgatttatttatgcactatatctaaaccggtattgttttgcttccagaatcccccatttttctgcacgtttagctggtttcgttctgattcctttgcaaaagtcgtcagatgtattttggtttaaaatgaatcaaaacaaaaaaacctataagtttaagtattcccttttatttgcttccggggtctgctaaaacttataggtataaatatttatcaggtctgtctttctcccatgtccgtattaccaccacacttctgcatggttcttatgctctcacgttgccgtcgcatcccgcactgctgccacattcccgcactgctgtcacatcccgcactgctgctacattcccgcactgctgtcacatacccgcactgctgtcacatacccgcactgccgtcgcatcccgcactgccgtcacattcccgcactgctgtcacactaccggcacgctcctacgcctcacgtccatccttcatcagctgccggatcatattcctgttaaaagtcatatgcatcatcatggcggttttggcaccgatagggtcgtgctccgcaatagcctcggtcacggcccggtgggtcatgatggtctcgtgggtcagctttttgtgggtcacattgacaaacataaggactgctgtatcaataatagggatcagctgttccaccaccttattcttggaacattcagccacacaggtatggaaggcgatgtcgtcttctatgtaactgtctccaatctttattttccgttcaacgctgtcacacagattcctcagcttcagaacatcctcctgggttgcgttgagagccgccatctctgcgattcccggctccagtatgatgcgtacatttaccaaatccagggccagggccatcttgtcctccaccgcccccaggcccagggggtccatgtccaccggcgtagtgctgaccacgtacgtaccggatcctctcctgacttccagaattcctctggaaatcaaaagtttcaccgcttcccggatggtactccttcccacgctgaacctgtctcccagttcaaattcattgggaagtttagcgcctacggctatgggcgtttccagtatatactggtatatctgctcctgaacctgctctgccagcagtttatttttcagattggacagttctcctttgttggccttctgcattttcctaaagacatcctttcccggttattgctgtgtgctctaatcctatacattctaacacattttaaaccggtttacaaatacatgcatgaacgcgccaactatccatccggcagccggaatacttccatggcccggctccggtatccgtttaaagggaaggcccggaaccgtacgcggaagtttaatgcaccctggcttcctccctcagcaaaaacacattcccatccatatcgtagaactgaaacatgctgccataaggcattttcatgatgtctccggttctgacgcctctttccttcatttctctatgggcgttctccaggtcgccggtgcataaaataacagatggatggcctacattcacatcgggattctgagtcttcattttttctttgtcataaagaacaaaggatgtcccgcctccgtattccggtcccacttcaagccatttctggtcagcacccatctgctgttccaggcgcacgatgaatcccatcttttctgtccagaaatccctggcctcattctgattattcacgtaaagcgttatctttccaatggagtctatcatgattcatatttcctcatttctgctttctttttactataaataattccctccaatcaaggttttcattcggtacaaggaagaaaagaaaaagcagcagctcccccggatgatattccggaaaagctgccgctgctaaactatttattctttatacgtcatatgctatttatcactgtacttattgcatatctttaccacaagaccgcttagggcaagcagggccatggcattaggtataaccatcagaccattaaagaagtccgccaaatcccataccagctccagcttcaaagcagaaccgattatgatgcaaaccactactaataaggagtaaatctttgctgcgccatcgccaaacagatacttcgcattgataaggccgaagaaatgccagcccagaatcgtagaaaaagcgaagaacaaaaggcatattgcaacgaatacaataccgaaggtaccaaatcctctcatgaaagctgcctgtgtaagagcggtaccattcttgccagactcaagagcgcctgtggtcagtacggaaaatacagtcaggttaaggattacaaacgtatcaataaatacgctgatcatagcgcaaagtccctgcttatgaggattctctgcggtagcccttgcatgtgcatgaggtgtggaacccataccagcctcgttggagaaaaggcctctggcaacaccgaaacggatggcttctttaactgcaatacctgcgcctgcgcctaaaactgcctgaggatcaaatgcgcctacaaaaatcatcttaatagctgcaggaagattagcaatattcatgataataagaatcaagcttcccacaatatacacgcctgccatgataggtacaaccttctcaacaacagatgccagcctctgtgttccgcccaggaaaacaaatgctgctacggctgctacgataacaccaatgacaaccggagagatagttatgttaaatgccccaaaagcctctgtaaatgcagcgccgatagagttggcctgaaccatgttgcccatgaatcccagcgcaagcacaataaagattgcaaataatcctgcaagaaccttgcccagagtgcccttaaaagctgcctttatgtaataaacaggaccgccggtaacctcaccatttacctcagtcttaaagttctgggccagagttgcctctgcataaatggttgacataccaaagaacgcacttacccacatccagaagatagcaccaggtccgcctcctaaaagtgcagtggctgcacctgccaggttaccggtaccaacctgggctgcaattgcggttgcaattgactggaacggtgtcatctcacctttttcgtgcttctcaccattaaggctgaggtgcccgaataccagtttccagccttcaccaaactttctcacctggatgaacctcaggcggatcgtgtaataaattccggtgccgcacagaagaacaatcaacagaaaactccagagaaaactgttaccttttgctacgagatttgtaataacgtccattcctaattccccctatacatttaattgaccgcatatagcggcattcatatttgtgctgatgtaatcagcgctccaaagagcgggatgtaaacatacaatagggacacccaccaaagatgggatagtatgcctcccttttgcctgtgagcatggaagattttatggacgcttatatctgtcctgcgcattcgcgccctcacagaatctccctggagttttcctgattcctccagcatggtactacattattcataaagaaaaaatctatacctgcgctggcagaaaaaggaatttttatagattgtttttattttatcatactttacccataaattcaataattatttatttagtttttagagaattttagttaattttatacttttttaaaatttatctcattttcagcttgacaaaatactattggcatataaatacaaatggaaaaagctgggtttcctgcatttcaggattcccagcttttatgtttgtgattatatggtttcttatgagaggcggcgggacttactattcccactccctaagtcattaacttatttgttaattatatagtgttttttcaaggcttttcgtgcctgttttattcaaattataccgcttatatagcatttcgggagaaacaggtatcatacgggtatcacgaagtatcattccttgaccgccttatttacatggtgctagcaccatgtcatattattaacaagatgtagcatcataaatcattataacttaatttgtctttcaatttgctccataacattttcttttttcagcttaatatatgcttgcttcaaattatcaaaagatgactgtaatttaattctttgttgttcttcgccgacctttttctgtgattcctcaagtgacagtttaaaatcttgagaagctttctccatatgatttaatagtatttggtactgatatattgcaaacaataattcttgataacaaaaaacaaaatttcctaatagaacagatgagttaccagcaaacaaaaatttaattttggttgcgacttctttaagattttctaatttaactaaaaattctttgtgatttggctcttttaaaacattatttattactggtgttatatgctctaaataagtattatttgtcattaatgtaaagtaaaaatcattcgctaaaattggtacttctttttcctctttttcaaatagagagcaattatttaaatataactgtattagaccaacagcaataagatagttttcaatacgtttatcaaataaatgctgtttattactcaatctaatctgttgttgagtttgtaacagcgcaactatcgctaccatagctgtaactactgcaacccaaaagttccagtctttaagcatattagctcctcctctcccctaaaatatagtattctaattaacagaatgcaaatatcatcaattatttcatcaagattattgttatctgcataacataaaaaattattttgacctgttctcaatccttaaaaaattcgctatactccacgtcaaacaatacttgtaatgcctttaagtcactagccttgatattccttcttccagcttcaatatttgccaatgtgcttcgtgacatcatgctgcccattaattgtaattgctccaccacttctatttgtgtcatattttttgacattcgcacggtctgaatgtttcttcctagtggaatgtcctgcaatatccactgcatactatacctccaaccttgtgactaattagtaacttggtttgagtatagacaataaatttcataatcatgccactagatagaaacaatcatatgtcacttaaaaaaccgatattcaatctttgaaaaattcctcataatccacattaaataatatcttcaacgcctttaaatcacttgctttaatgtttcttctgcctgcctctatatttgccagcgtacttcttgacataagccctcccattaattccagtttttcaattacctctttttgcgtcaaatccttttccattcgcaccgtctgaatatttctccccagcggaatatcccgtaaaatccactgcatgactataccctccaaaacttttgtgactaattagaaacttttatattgagtatagtcaaaaactgtgctaaacttgtcactagatagaaacaatcgtacaaggaggttcagaaatggaaaaaatgttagagcaactttataagggagaattatatccctattcaaaatttcaaacaacaattgaagattttaaggtaaatcgggataaagcctttaaatcctattccgtatttattgaaaaactgccagatgaattaaaagacgaatttgacgaactaatagattttcaccttgacctgttaccgcttgaattagaacaaaatttcattgacggctttcgtattggcgtccgaatgatgacagaagtctacgccgctccattggatgaagaagaacactcatgaattgttataagggcagccgccaacactccggggctgcccttatttcctaccgacttaattcttgttccagtttgtatacggttccctttagatcgttctgctggtggtataattcgtctctgcgtctgcaaatttcttgattacgttttaaggcttccttcacaccttctctggccggaagttccgtttccttatagtttttcatcagttcccggatttcggcattattttcttttatccggctgcttaacagaaacaactgcaccagattttcagcttctttgtccttttcaataattccatattccactaacttaaccgccattcggaacatgacttgcttttccatttctgtcatagtcaccttgcccccttctcttttttaactttaacttttctgtcaatctcacttctttttccttcctctgtcaagcgccgtaactgttcccgaatactttcttcctctggtggtttctggccgccacgggtgcggtactgctccatagctttttgataggctaatacttctccctctacctttttatatacccgcatgaagccctgtacggacttatatccgctgttgtttacgatagtattcagatatgctttcatagaagataatcgttcctgtgcattagcaattctactttctgaagattttcgttcctttcctctgaacaaacctttgacttcttccagttcttcctttagatgtggaatttcatattgttccagattacggattgcaacaatttgtttttccagtttttcctttgtgtcttgcattttacgaaattctatcatatcaacttttaaaaccggcttcggcggcattctccatttttctataactgtttttaaatgctttgttgccttttctacgaagatatggaacatccccggctttctgccgttatcagcgatagatttagaaacctgtgcagtaatttcctgcttcttgacctttcgtatttctttttcctccactcccgctataagcgcttcatccacggtaaaattccattcctgccttgtctgattatccttctcaatctctgccgctttgggattatgtttaccaatctttttggttggaagataaacgctgttccggtcaaatacctgtaatcgctccttcggattatctatgtattggtttattaattctgtaaagtttttcttttcttctgccagaaattcatcgcttttaaaatactgatttttattcgtaaacatccggctttcataaacagaaccctttggaataattttacacccctcccgtacgtttccttttgtgtctaaaatctctttttttgttcgtacgtgcttgccctgttcatcatagaacatattccgtgaagcaattttaatttccggttccggcaatagctgccgctcactgaaaatcaagtgaatgtgataattggtctttcgcttattgtgatgtaaggcagatacacactcaatatggtatctgtttttaaacgcttctgtaaacgtttcaagtacctgctgcggattatattttgtataattttcgggcaaagcaataatcaattctcttgcttcaatacatttcccctctgttccgctttttataaactcctgctgattctcttttgcaagattcttccaaaattccatatctgctgtctgataggtagcgtacaaattttcctgtctggcatggctggatatatagtctatcctccctcgaacatcatgcagcttggatatttgaataaatgaatttcttgcgatagatgacgctcctttccgtgagtggacaccataaggtgtccgtttacgaacccagcccattatcgggcaaaagccccctgcaagggcgaaatatacccagagcataaaccggaggtttgtgcgacgggtgtatttcgctctcaaacgccgagggcttctaaaagactatcgttttgctttctcgaatgctgatatgatatgtctaaccgtgctatcctcccacccggcaagccatattaacgtattttcttcctgtgcggttagttccgtttcccctaacacttggttaagcaaatctatttttcttttctccgccgtataaaatatatcgtttacgtttctgcttcctttttccggctgtctaatcatctcgttaatctccttccgaaagtaagaacgcaacattgtatttctttataaattgcactgttatctttgcagacctaaccttgcaattacgaaagacttacattgttgcgttcttggattttatgatttatctaaatcccagtaccagctacttccctgtcgtttagattttatattgagttcctttttagccatgtccagtgttcttttagaaatgccgattgcttccgctttctgctccatatccgcactggaaatcaacacattttttccatacaatcccttgataagctgcttcgcctgttgtattttatttgtcttacaatagccgcccagtaattcatctattgtaatatcataggctcccaaataacgaaattcatctttacgccgctcaaatgctatgggctgcccttcttcagccagattgttttttatctgcgccattacccgaatattttcctgctccgccactcgcgccaccagtaacacgcttcttgccactgcgaaaaaatctatggagccgattccacggtaagcagctttgacaccgcttgccttattcatgtgaccgataagaagtacggcgcaccctgtatgctctgcaagctggcttaatttctttgtcatatctcttgcttcattcgctcggttcatatctacaccgccgcctaaataggcttgaatagggtctaagataagcagccttgccccagtagcattgatagctttttccagccggtcatcatccatagttaaagatttctcccggtcatcaatgacaagaatccggctacaatctgcctttgcttcttcaagccggggcttaactgtatcagataagccgtcctctgcggtttgataaatgacagataaaggaacgcccgttgtgtcctcctgcccgaaccgttcgcctttagaaatacgtgccgccatattcaaagcaaatgttgttttaccttcacccggatcaccctgtacgattgttatttttccaaaaggaatgtacggataccaaagccactctacctgctggctctgaatcatatccatactgataagttttacttcctgctgctcctgcaactgttccatttcctgctccttcctgtgcgattttcgttgaaatccgccggagcctttggtacactatatttgcgagatatgatacaaaggcttcggcttttgttatcacgaaaatgctccggtttaattctccggggtattttctttgccctgccagagatatttcgccccgtctaacatccataaaactgcttttaacaaatccatataactttctttcgtttcctctaattcctgcgccgtaaattctgccttattctctgtaaaatcttccgctaattcagtcaaatgtttttccatgtcctgtaacttatcaactatctgatagactgtttcttttttacctaccacacaaaccctgttgtaaatgcaggagcggataaaataatctttctttttcataccgctggcaaatatcttggcttctatttcctgtcgctctctgggcgaaatacggaagctgatagtaggatatttatgtgttccgctcatttttctgttccctccttaaattcttcgtcaagtttcatagccatttggctttgctcggtcggaaacatatgtgcatatcggtaagttatatccacgctttcatggcctacccggttcccgattgataccgccgaaaaacccatactgataagtaacgatacatgggaatgacgtaaatcatgcactcttatcctttttacacctgctaggctggctccccggctcatttcatggtgcaggaaactttttgtcatatgaaagattctgtctgtgggaaggacaccgtataatctgctgatataaacctgtaattcctcacataagaaatccggcatactgattacccgtttactttttggcgttttagggtctgttatgatgtccttgccttgtaaacgctgataagattttgtgattctgataaccttgttttcaaaatcaatatcttgcggtgttaaggctagcaattctcccagtctcaaaccgcaccagtacaatatctggaacgcataataagaataaggtttctctttgacagcttcagcaaattttaagtattcttcttttgtccagaataacatttcttctgcccggcctttacccagcgggccggcctttgtcaccggattactttttagttcataaaaccgtaccgcatggttgaatagtgcgcttaactctgattgcagagtttttaaatatgtaggtgcataaggcttccctttttcatcacgataggaaatctgcttattctgccactggataatatcttttggcttaatatcccgcattttcttatctttaaaatagggaagtaatttagtacgaacgatatgttctttcgtgagccatgtgttatgttttaacttcggctgcatatctctggtgtaagcggccacaaattcagaaaatgtcatatctaaatcagaaccttctttcatcagaaagtgctgctcccactccaccgcctcacgccttgttttaaagcccctcttgaccttcctgcaattttttccagtccagtcattataatggaacgacacgaaccacgttcctcgcttctcgtctttataggctgccatgttgccacttcctttcttaattcgcttttgttattccataaaacttttcttcgtaatacttccggcttacccttcctgcgatagtaagaaacccttttgcttctaattcttcattcatctgtcgtaccagtttgtaggcaaatggttttgaaatgcctaattcttctgcaatttccccggctgttacaaataaagtgttgttcaataaaaaatctccttcctttttgatttgcggcttccgtttgtatcgtctgttgccagtgtttcaactgacctcaaccgctcatgcggctatgggattgctccttttcgagattcccaccatttacaggagtgtctttcttcgctcgcccttacggggtcttgacggaagtctgttggcagatgatacagctcattcagttctattaacattgttgttaatgttgtatccacattatacattcgcttatatgttaatgtcaagtatttatttcgcaaaaatgttaatattcctatttactattttcagattatccattataataagggaaaaggtggtgaatagaagatgacagtaggcgaaaaaatcaagtttatccgtaacttccggggcatgacacaaaaagagttaggggttggaataggctttgatgaaaaaggagccgataaccggatagcccaatatgaaacgaattatcgagtgcctaagaaagatacattgttgcagatagcgaaagttttagacgtgaatccgttgaatttcattagtgaggtttccggttcagcggaagatattatgcagaccttcttctggctggatgaagataatccgggcgcaattaacctttttcagcttgtaaagaatccggggaagtgtaatgcttcggatgataccgctgtgcgttataatgacagtgatgactggcctgctcacccgcctgtgggattatggtttaaatatggcgttgtagatgattttatgcgggaatggctggttaggaaaaatgagttgaaagctggggagattaccagagaggaatatttggaatggaaattgaactggccgaatacttgtgatgggtgtggtgtatacaatactaaaaagagatggagagagatatgagttataataatatttacaatttcaaaaatcctattaaacacttcattgatattgattccctcatcttttcgcctactatttctactttagatattgaagatacatgttggacaataccagtcaaattcaaaatcaataaagataacactgcatttcgtacactaaaaatgcccaatattatagcacttgtttgtggttatgagcattttaaaactttacctcattttgacaacccccaggaattagatcccattcataaacgattatccacaagcttaacaactggtgactttaaaatcggagaatatgatatacagttagaaaacgatttcaataatctatgcgtatatgataacttattaaaactagatattaaagagttttatggaaggctctatactcattatcttaattttcatggtttaaaagataggtatattacaaaccttaataatggtgcaacaaacggattaattatggggaactatctttctttgtattttgccgaacaacatttggttcgtttgagtaatgatataaatcaactactaaatagtcatagcatagactgtgaattttcatacttttctgacgatttttactttttctgcaacaagcatgataatcaaaaaatcatcgaaatattcgatgaggtattagataaatatgatttggagcgtaatgagaaaaaaatcgaaatatgggattacgaatctttcaact

SEQ ID NO: 577 - DNA, 42408 bp, Enterocloster bolteae
  source 1..42408: mol_type = genomic DNA
actggtgcatccgggcctggatgggaagttggaaaccggggatgactgggtagaaaacggccacaattatccggaaaccaatctaaggccagggccggatggagtgttcggaaccgaggatgatgaagtgtactggaatggaccggatagaataccgggaaccgaggatgataagaaaattctcccagggccggatggacaatatggaactgaggatgactgttatgataacaaagataaacaggaaggaaccaacatgcggccaggctcagatggaattttcggaacggaagatgatgaattatggttaaatggtccggacgagatgccgggaacggaagatgatatcaaatatgtccataggaattcatctggtggagggggtggatatggaaaccgattggtcggaagaggagcgtataagcctgttatagaaataatggatgctgctttagaggcaatggagcctcaaacggtcggactggtttctaatttttatgacacctaccaatcgttcaaaaaagggcaggaaatgagtagatacatagtgaatactgggatgcaggaaatacaaatggaggctgcaacgggttcacaggttgaaaaggaaacacaggaaagtagatggagtgatgaatcctattctgataaggatgtgggaccggttgttcctgttaaaacatacaggaacatgaaagtgatttggatgatattacttttaatattactctgtgtattaggatacgagatttacaaagccaaaaagaaagactgatttatggacagaactgagttctgtttcatggaagatgcgcacattgacaagtaaatagtgtaatgccatagtataaaaattaaggttgttgccatagagccaatggaagagttaagaatgatattgtctgtatataggaattatgctatattaaaaaacaggaacaaccgtgttgcagggtggctggcctctattctacataggatgggggtggtgctgatgaaacattttgattttaaagacttgatggcctttggaatgttcattctggcattgctgacattcgtatttacgtatatcagataatgttttaagcatagaaaaaccaccccaaaacttgaccggtgaaggggtggagtttctaatccattaactaacaggtcaaccatcttgtgggcggttgttccttttatgcttatattatagcaatgaatatggaataattcaagaaaaaactattttgcataggatgtgtaagatgatataataaagagggaatggagggggaggattttaagactcgcctcactataattttgttctaaaaagtgaaaatcttaaggtagttgactgatggataaaggtgaaaaagtatgagtggaggagcacataagttaatgggggtggttcttggtggtatgattatcagtgtggtagaacctacactccccgtagccggcttaattctgggaatgtccgttttgggagaattagcaccggatattgatacggtcaatagtacaattagccttagaaccccaatcataccaaaacttattaatcgaaagtttggtcaccgtggtttgcttcattctccattatttttagtattgttatggctggtgataggaaggcaaaatctcataggtaatgtattctgtattggatatctggggcacttggttcaagatttatttacctgtgcagggcttccattactatttccatttaataaaaagaaaataagtttgttcccttatcattcaggtgggataatggattatgttacaacatctgtattaattattttattgttgacagtgaatcagttgatttaataggagggaaattgatatgtttaaaagattagcgttaatgacaattgcagcaactatattggcagcgacaccagcatatgcaggccagtggatgcaagatgggaatggctggtggtggcagaatgataatgggagttatccagcttttacctgggcctggtgtgatggaaaccatgatggtataggagaaaattacttctttgatgaaaatggatatatgtccatggatacagcagctcaggaaatcgctgtaaatgagaatggagctatgttgtataatggggagatatgtacggctgcaatgccagatggccaggattttgttccgggaatggcgattgatggaaggttagtttattgggtgtatcaagaatcggatgcctcaatagctgctggaaaggaaagagaaagccagaaggggatggtatcaaataataatgcaggaataaccacctatgaacatattgatatgaaagcattatcatattatatgatagatttgataaatgaagaaagagaacagcgtggaaaagactctttagtcataaatgaggaattgatggatgatgcagcattaagagcagaagagtcatctataaaatttagccacacaaggccaaatggaaaagattattcaacagctatcaatgtagagtattcaaaagtaggcgagaatttggtatattctacgtttgcaccgaatacagagatggaggagattgcacagcaaactataagtcaatggctaaattcagaagaacataaaaagaacatgttaaagagtcaatgggatgaaactgggcttgctgcatatgcaggagaagatggatgtgtgtattttgcacagatatttatacagaactaatttatagtaaagattgttaacttttagatgattaaaaaagagctatggtactgcagaagcagattccatagctctttttttggaggaaatcaaatgaaaataaaaaggttaaaaagaccatttgtattgatattggcctttgtattgctattatcatctatttcacagtcggtatcagctgctgatactggacaagtgattaattatccaagtctccctatttttaaggggaaatcattcaatgcatttggaaaaacacatcattcaatgaattattatcaggttggtctggttgatggcgctgttcctgcattctgcattgaagaaggcaaaaaactaccagacaatacagtcatgacttatgaaaaatatgaagctaaaccgggccagaccgtacctgttataggctcatttgacaggtatcttcccatgacagtggcatatgaatggatgctaagagaaggaaattatcatgacacggaccgttatgcagtaacgcaagtatacatgtggggctgtatgtcaggatataaagacaattggccagcaatggaacaggctatgcaaaagttagcggaagtcttaaagcggccttatgtcatgaattattatgaagaattgaaagagtatgtgattgagggagtagctgggtatgaagcggccaataatgcttcactgccatcatggaatggtacacagcaaaaaatgaccctaaaagatgggcgttatgaattgacacttgatataagtacttgcccacaattaaaagataccacatggacgtttccagattccaactggaattatcagttgtcatcagacggaaataacataacgttcatatacaatggtgcacaggagccgataggaactatttcatctgcagatattgagggcatagaagcaacatattatgcgtatatattttcacccccaccaggtgagcaggtgcaattaggtaggttggatgcaggatttcaacctgcaaatgtaacttttagtttaaatcaagggactttggctacgccggatgtatcaaattgggaagtttaccgtcattccgaaacatttgagagtaactataacatagaccttgaaaaatattgtgctgagacgaaccaacctttggaaggaacaacatttaatgtatgggaggattttgacttttcacagataaacgagggcggctataccgaaggggaaccggacggaacaaccggtgaggtgtatttaaactgtatgacacctgagccagaatcagattatatctgcgataccatcacgacagataccaacggacaggccagccacagtgatgcccgcttttataattacagcaagacctattgcatgggacatccagctccagagtggattgagtgtgaccatgagggaggggagggagaagatagtgaagattgcaactgtgatgaagagaatgaacgcctacgtgagcagtggatggcagagcaggagttatgcgcttccacatgtgattttcatgtacagaatgatgacgaggagaatcatggccaggatacggctgctatggaggccatgttggcagacagggatgaaacatatgagaattttatcaacttagaatacagctaccaactggaggaaaaaacagccagaatcggttatgtacttcatggcctacacaatgatgaccctgagattgagacggtcattttaacatcggcccaggccggtggtgatgtccggtccggtacatataaggccagtaatatggttggacgagtattgaatcctatctataacatggccatatccaggatagagggcctaagggcctatacgtatcctgtgccagatggccaggacctggagttggatgaacagcgtagcataatcagtatattgaaagaagaggaagaaaaacctcttattgagattgagacaccagtagataatatggttgatggaaccggaaatcaggagaatggaggttctggaagcagtgaccagggaggcggctccgaagataatagcgaggaatcaggggaatccggaagtggtagccagggaggcggctccgaagataacagcgaggaatcaggggaatccggaagtggcagccagggaggtggctccgaaaataacagtgaagaatccggagaatccggaagtggcagccagggaggcggctccgaagataacagcgaggaatcaggggaatccggaagtggcagccagggaggtggctccgaaaataacagtgaagaatccggagaatccggaagtggcagccagggaggtggctccgaagataacagcgaggaatcaggggaatccggaagtggcagccagggaggtggctccgaaaataacagtgaagaatccggagaatccggaagtggcagccagggaggtggctccgaaaataacagtgaagaatccggagaatccggaagtggcagccagggaggcggctccgaagataacagtgaagaatcagaagaatccggaagtggcagccagggagattctgagggaactgatacgggaacgccaatggccagtataagtttacatggtaaatccttgctcttgtcatccatagctacacagagcaatgcgaaaaaagaatcggtagaagccatagaaacttcggatacggatgaggaagaggtagaagaatatgaagcgtatgagtatgtgagaaatcctttggaagtatcctatgaaatggacatcagcatgaccaagacagatgaaccagaggaagaggggaatggcattacacgcttcctgcattccttgtttagtggggatgatgatggtgatagcatcatagccgccttgccatcgtttgtagatgatgacctggaccccatagatgtatccggatatggagcatcaggaaccatcctttatacatttaaagtgtgggaccatcggaccgaaggtagaatccatataaataaacgggacctggaactttacaatgcggaccaggatggaagctatggtttgactcagggagatgggaccctcgaaggggcggtatatggtttgtttgccgggcaggacctgtaccatccggatggaaagtttggaatcgtctataatcagaatgacctggtagctgtggcaaccacggataaaagtggtgatgcatcgttcctggcctttacagagaagccggggacacgtctggatgatgatgggaacataaagccgctggaaggtgtgacaggaccggaaaatttgtacgatggttcctccatcacatcctcggaggatggatttggcaccattacgtatccggattatgtagcggctaacggtgaccagtggattgggcggcccctgctgatggggaattactatattatggaattaagccgttctgagggatacgagctatccgtaaatggcagttctatgtcagagacaaaccggacccaggttggaactacaataagagaagctggtcaggcccaggtagtaggagggttgtccgattataatgatatgagtgcggatggctcatggaatgattttattgtagagaattataagacagaagagggttatgatatcacaataactggttatccagaaggggcaaagatatacagggtagatattgaaaaccggaccgaaaccgtaaaggtagttaccggcagctctttgcagccgaaaacagatgaccatggaaacattgtatatcaaacggccaagggcggggagtataagataggaccggatgggaaccccatcataaaaacagggacagctacggacagcagtccggacgaacaggcaccttatggggaaaccctatattaccgtttccggacggctccatatcccagtggcagcgcaacaccaggggatatgagtaagtggggccaggcaattgatgggaattacctggcagaccaggtgaatgatatgctggggcagattggatataaggcagctgcagacacatccccctgggccgatatagaactgactggggcaacgaatgctcttgcagcccaggaaatcatggactggttcacagcgcataacttttttgattgtggtgccgtggaatccatttatcaaaaagatgggggataccatgcaaggctgctgtatgactattccgcagccagtgatacatatccagcggtgtatgattccgtaaaccagaagctgtatgtccgtaaggtggcagaagtagatggtggaccttccggtgaggttgggtattggattgagtaccagaaaggtgaatatagcttaaagagcaagactgtatctattaaggaaaaacggcaggttacaaacagcataccttatggtgatgacatagcagcattcattgaagtggtgtatcagccggtttatgagacataccaggctggagaggtattgttggaccgctccggaaatcccataccagtgatggagcgtgtatatatgtatgaggaccaggagcagacggtagagcgtgaaaaattggtaccgttggatgcggtttatgatgcacagtctggtacttatacaatccatattaccaatgctatggattggagtgggacaacagatgcggtgaggaccatatatcgtatcgtgacaaccgaaaaaaccattgaacatgatggggtagaaatgccctataaccagtatatgacggatgttgttggtgcaggagtgagcgcatatgcttccatgccggaattggatgagggcagctacatcaagacacaggctttggtatatccaggccagaatgaacctacacaggacggaggaacgggagacaggccggtccaggtgcttcaaagagccatcaaacagtccatcaaggtgacaaaggatatctcccaagcgtcctatgatggggttaatacctatggagcagtccacaatgacccgttgacggtattactgggcctgtttaatgggggaagcagttctcaaggcacaaagatactgaatcagtttaagtttaaggcataccttaagagtaacctggaggacatctttgtggatgatgccggtaccattgtttcagagtacattgggacagatggattcacggaggaagtacagaagatttacctgccccctaaggatgggagcggacatcggctgctggagacaaaagaggatgggacctataattatacaaaattctttgatgctctgtatgcagcagaccggaaagctggagggtacccggtagaagtggttaggcagtttgcgattgactattacgacatagatagttataaaaaggagattcttgcagcggaaccgggattaaacagtgatgtggcctatgaccaggcattacaaagggcctcagaggccgcagcggcctatttggatatctttgtgggactggatgaccgtctggccattgcctgggataaggatgctggtggtggagcggatagtgacaggactacgctgcagtgcaataccaagaacgggaaggatgattattataataattccatcatgcttccatatgggacctacgtcatagcagagcagacaccggcagatattgataaggaactggcaaacaggcattttaataaagattacccaaaggaagtcacactgccctttgttccggatatcagtcaggacgagaacactggggaaacggatgtcaactatcagacaggcagcccctattaccgatatgatagcacagataccccagaggaattgataagaaagtacaagatacgctttaatgaggaaaaccatattatccaggcacatggccaggatggtgattacgaagtgtttaaatatggcctggataaggaggtacggcctggacatagccttacgtccacggaaccatatgaggtagcttacatggatggacggaatgaggcagtaaaaagctattatgccggatatacatcccagagtgaggatgccagtaccatggatgatgtgatatatgatggatatgagacagacagcggccagatggaggttagggatggtgtggcaaccatggaggggatgcagcttgccattgacggtaagtttgcccctatgttggtaccatggaccgtactggaaccagcggtggaccgggtgaacccggataccggcaacgtggaaaccctgataccatcaggaagtggagcggattttaactttgtggcgtttgcgcaggaagattttgaggatacctactataacacgaagctgcggattgagaaactggatgccgagacaggggacaatatcatccatgacggtgcattgttcaaaatatatgcagccaagcgtgatgtagaaaagagcgggaccaatactgtcactggtaccggtgatgtgctgtatggtgaggccgtggattggaaaggaaacccggtcctggatgcggatggaaataagatactgtatccaagggttggtgagagcaatggcagcatggatgacctgcctgtccgtctggataaggaggggattccacaatatgatgaaagccaacttatcaggcaggaggaccaggatggcaatgaaaccggtatttttagggcatattccactatccgtgaggtggttgtggatggccaggttcagaaagtcccggtaggatacattgaaacttataagccattaggagctggagcatatgtattggtggaggtccaggccccggaaggttatacaaagagtcgtcctgtggcatttgaaatttatgcggatgatgtgacctattaccatgaccagcgcaatccggatgggactacagacggatgggagcctaaaacagcagcaaggtatcagtatgcggtgcctgtggcaggagatacaaataaattccagactgagatagtaagccagattgtggttgaggattatccttccaggatggaaatccataaggtggaggatggtgattccatggtggggaaccagaatgtgctgcagaaaacggatgcccaggggcagacggaagcaagcggaggattcgagggggacatcatggtgaatgatgagggtgacctcctcatgtaccgggtacatggcagaaaggaaaagctggaggagcgtggagacgtaagggaaattacctatgacccagataccaaagactggtatgggtatgtaacgaaaccattcgatgaatactctgagcatatcgtagaagggacggaaaaggcccttaaggccatgccgggagtgaagctgctgtacgagctggatggaacctacacagggaagggaatccggtttgatataccggtatccggagcaaggctgtctctctaccatgcggtagaacttgaaaagacaggggaaaaccagtacgaaggtgtgacggtagagtatgaggatgggaaagtgaccagaatcatagatacgaataccggtacccacaaggaaatccgaaggacaggccaggacagcggaccagctgggctgaatgtctgggataccataatagtggacaacaatccggttgacctgtatttctatgacctggaacaggtagatacgatggaggacccagataccggtgagatatggatattggatgaccggggcaaccagctctgctatgcagatgcccagtctggtatggcatatgtttatgatgattatgggcggatgctggcctatacagcggatgaggaagggaacaaggaactggtgaagtccatccaggtcatggatgatggaactggaaacgggcagaccatttatgaagataagagcacagtggatgatgaaaatggactgccgatttactataccgctgggaaggtagttacaaaagatgaaacatggattacagatgacagtacggacccttatggaaatccagaatcaaccggtgcggttcatactatcacacgtctgcccttcggcgcctacatccttcaggaggagctggtaccatatgagcagggatatattcaggccaagcatatgggcctggtgctggaggacacagatgaggtacagaaatatttcatgcaaaatgtatttaccaaaactgcgtttgccaagatagacgtgcgtacacagaaggagattcagggggccacaatgaccttgtactgcgcccagctggatggcgaggggaatccactgaaagaagaggacggaacctataagaagggggatgcatacaccacctggctaagtggctatgaatatgatgataacggaaatctgaaattggatgaccaaggccgtccaatcccaaccacggagccacattggattgaccatatcccggtaggattctatgtgctggaggaaaccatttgcccatatgaacagggttatgtacagtccgtatccgtgaacattgatgtgctggagactggaaatgtacagagttttgaaatggaggatgattttactgccctggaaatacggaaatatgacactaaaaatgaggatgtcatatatgaggatagtgaggcgtacctgactctttaccatgcgaaactggacgcgaaaggatatccggtcatccaggatggtatcccacagtatgatgaatttgggaagatatttacattccgggcagcaacgtataaagatggacaggatgtagcgtcaaccgggcgtgaggtgccagatgcaggtgggaatcaccccatcatgaaatatgattatgacttccagcccatcccaaatacgtaccagggacgatactactacacggagaatgcaacggtacggatggaatacctgccagtaggaagctatgtactggtagagacagacaatccggatggatacgccacagcagaccctatcctgatagaaatcgaggatacgggacatctggaagaaatccagtatgcagaaatgggggacaagcccctaagtctggaggtatcaaaggtcaatatcactggcggtaaggaagtcaatggtgctgtccttaccatatacccggtagatgaacgggggaatgtgtcggatacccccctgatactgcaccaaccgaccgtggatgggaactaccaggatatcacggctacatgggtatctggcctggacggtaaatacaccgatgcggaccgggtggcaggtcttatcccggatggatttgaggtaggggacttgaagccgcacctggtggagtatataccggaaggggattatatcctaagggaggagacaaccccatatggatttctgcagtccgtggatgtaccctttaccattacggatacccaggtgattcagaaggccgaaatgattgacgagataccggatggaatccttaagataacgaagagtgatacagaccggccagatgagaggctgcagggagcacagttccagctggagaacatgacaaccggcaccctatgtgagactgttaccacggatgagcagggaatggcacaattccagccacagccgattggttatatggacagagatggaaactttaagccatacacctataagtgcagcgagacaaaagcagccccaggccatatgctcactttaagcccatatgagttccagtttgaatatgtaaatgagttgacagacaagattgtactggactataaccctacaaatgattccaaccgtgtggtcacagacaaacggatagggaatacggatgagctgctagatggtgttacgttacgtatcgagcgtaaggtggacaatggatgggaaaccatagacgagtggatgactggtaagcagggccactatacgaaggacctacaggccggtgattaccgtttggtggaaatcaaagcagcggagggattcaagcttctggcagaaccaattgaatttaccatcagtgacggtatgacggaagtcccgcactttgttatgcgtaattactcaaccattgtggacataacgaaggtacagagtggtacggatacccttcttgcaggggccaggctgcagctgataagaaaggacaccggggaagtaatccgggaatggacgacccaggaagatggtggccagaaattctatggactggagccgggaacctatgtcattcatgagctgcaggcaccagctggatatgtcatggccggggaccaggagatagtggtaacagagaataatgataccactcaggtattccagtacgaaaaccggcttaaatcctcatctggaggcggtggaggcggtggagacaagccaaaacccaaggtggactatatttcattcaagaagatagatttaggagggatgccagtagcaggggctgaatttacgttctatcgtggtgatggcagcgtgttggatacagcagtatctgatgcaaacggaaagattacgattaaacggccagagtccggaacctacacaatccgagaaacaaaagcacctgatggattttatataagtgacaagacttatacagtcacgattggccagggtggtgtccaaggggactacgaaatagtcaatgtccccaatacaacggttacgattagcaaattggacgctgaaacgcaggagccactgtccgatgtgaaattacagattttggacggcagcaatcatgtggtggccgaaggatggacggatgataatggccaatttggttttgtggcaccatatgtcgggacatatcacataaaagagctggaagcactggaagggtataggaaattaccaagtacctatgaatgtggcgtacaggaagatggaagtatcacaggtacaacaacgctttataactctaagacacaaaagattggcaaggtaatggcctcttacacaccacaccttactgggaagggtgctgcatcatttggcgttccaggaataagagtaccaggtgcaaagacaggagatgatacaccaattatgctatatgtagtcatgcttattctatccgtgttgatattagccggttttgttatcacttactggatgcggaagggaaagaagaagaaaaatctcatgatgttggtccttatcataggattatccgctggaatgcattttgaggggaaagcagcccctatggacacattggaggttgcaacctcatcgaatgcttccagagtggagttacagcaaaaggaaggaatcaacacattgatagtggtatctgcgccaaatatagatgcggaaagtatccccaggccagaaaagacctaccaatatgagggaaaaacttatgaattacaggattataaggttatagaaacctccatccctgagagggaggaaattgcaagggatacaattacctataatgaggtagaacaggctgatacgataccagcaactgctgtaatagaggtagaggatacaattacgggaacggtcacaaaagtgaccgtccccctcaaagattatgaatatacagattaccggtgggtagatgggttcgagtttctgataacggtcgaggccgctgacgcagacagttatgccctgggagacatactgattccaagacaggaggaaaatccatttgcaggatatgaaaacaatttgctggaactgatacaggttaatcctgcttattatcagattcatacagtggagtggaccggggaaccatgggtagccgaagatggagttacatatagacaggcaattgcccgtggcttaaagcaagtggccacagtcaatgctacatatgagggcattgttctacttgattcggtaccggccaatgccgttgaagcagtgtatgaagaagatatgtcccaggtggaaacggagccagagaagccggttgaaatagttgaggttgaggtggccaaaaaaaacttatgggatttcattctggagttgttaggcagactattaaaacatcccataattgctatggttacatgcattgcattgattatcctgatatgcctggttgtcactatcttgcaagtattatcatcaaagaaacgaaagaagggggatgaggaatgaaaacggtaggaattgttggatgccagccacgtattggaacaacaacacaggcactgcagcttacattatgccttatgcatatgggatataatgccgcatatgtggaaatgggggaaagagattacattgaaaaactggatgcattatatcaaggtattacaattgataaaaacgatataatatactgccaatccatacccttgtatacaggaagtcgaatcgctttggcgaaccggggacgatacgattatgtgataaaggattacggatatataggaaatccaggttttgaaaaaatatcatttttggaacagcagataaagattgtggtagggggagccaaggccaatgaggttgattatgtggaacaggtcatagaggatgaatgctatgaagatgtaaactacatattttccttcatcggattaagtgaacagcgggacgtgaaggaaatgatgaaaagcaagaaagaacggacctatttcgcagtgtatacaccggacccctttacctatgtagagaatgatatttatgagtacatcttaggagattagagatggaatataaaaaacggttaggtgaaaaagtcgaagaaaaaagggcctttgagcaggaacagcaaaaattacgaaggaaatataaaatccatgaagatggaacgattctggtcaaaaagaagcgtctgatagaaattctgcttaatacaggagctgcgaccattagaataggagccaccatcattttatgtagtttggcagccatcggattgatttcgctgttgtatgtcggacctagaacggaattactaataatcatgcaggaggtagttgaacagctgcatagtatgttaggagtgtgatttatggggaagttaaaaacaggagcctatgcagccgtttttgtgttagcccttgtaggattaggcatatctagcacaagattgctggatatatctgcagagtaccaaaggtcaaacatagcatataggcaactaagggaaataaagggtatcaaggggccgcgggaggtggtggaggataaattaaaggatataaaccctgattatatagcctggctgcagatagagaataccccaattgattatccggtggtaatggaatctgatagggactatctgataactggattttatggggagaatagcatagccgggacaccatttatacgcagggcgcaaaatgcatttcaagataagaatacagtgatttttggtcataacatgagggacggaaccatgttcgctgcattaaagaactacctgaaatcagagtactgtaaacaatatccgaccattactattttgaataaaggaagggaatataaatacaaattattttcggtacagttacttaatgaggatgatggaagtgtattcgcatatacatttgcaaatgatgaatcctacagggagtatctggatttaatgatacaaaaatcattggtgcagcttacggagcagccagacacggacagaaatataataaccctatcaacctgttatggaaaagacaaaaggcttgtagtacaggcatttggggagggataatatatggcccagagcagtttggatagacagttggatatggcaatggggaatttggttatcgttataggaaaagttttaaaatctgtttggtatggatgcaaaaagttaagaggcaggaaaatcattccctttatgctatgtataatactggccgtgattggctggatgcaatgggagcagatatcttcaatccttgatgtcctgaatatgccagggtggatgcaaaagatattatacatacttatccttttatctccagccatagaccttgccctgctaggaagtgtcatcaccagaaagcaaatggaatattaccagaaatttgaggaaattggatttaaggaaaaaacaggaaagtatccattgtatttaggcgaagccgaggaaccggatggtcggatgtgctataccttccgttcaaatataaacataggtgagtggaagaaacgtgctgaacagatagaaaccgtgttagattgcactatcctgcggattgaaaacaagggtagtaagcgtgttgtccaaatgttggccgtgtccagtgaatatagaataccagataaattactttgggatgaggggtatttatctaatgaagatggtgtttgtgtaataggtcaagggatgttatcccagatatcatttaatctgaatcgtacaccgcatgtactggcagccggcgaaacaggctcaggtaaatctgtaatattacgttgttgcctttggcaattaatacgccagaatgccagggtgtatatgattgattttaaaggcggtgtcgaatttggcttggattacgaacgttatggtgaagtaataacggatagagagagggccgccgaagtattggagatgttggttaaggagaatactgcaaggctggcattattccggcagcttcgggtgaaaaacttaccagagtataacaagaaaacaggaaagaatctatgcagaataggtgttttctgtgatgagattgctgagatgctggacaaaaaaggtgtgccaacaaaagaacgggagatttatgaacggctggaaggttatatatcgacactggccagactatcaagggcaacgggcattaatctttttctgggggtgcagcggccagatgccaatgtgctgactggccaaataaaaaataacattcccatacgtatatgtggacgttttgcagataaatcagcctcagagattgtactaaattctacagcagccataaatcttccagacataaaaggcaggttcttatatctacaaggaaatgaattgatagagttccaggcatattactttgatgatgaaacgatgttggatgaatcggtggaggtattacctgggagtatgcttacagaaagctacacagttaatcatccaaaggagcagattaaggttccttctacaaagaacgtcacggaagagataaaacaagtcaattatgaagagtatgattttaattttggtgaagatgaggaaatagaatggagtgtggataaatgagcctgttaccaatacataaaactggagaggccacagaaacaaaaaagaagctgaaaaagaaaggggaaaatcaggaggcagagaacgtacaagaaaatacgaaggatacagtagctgtcaaaaagaaaaaaaaggaaaagcagccaagagatactacatatgttttaaaaaagaatttcaccatgaagatttttcgatgggtattttggtttatgttagtatgtgtatttgcaagaggcgcatatcaaatcataaaaccccaagcggccgatgagctgagacagatgataaaagattttgaacagactcaacagagccagggtgatgcagcggaggaggtgatggactttgcccaagattttgcaaaagagtatctgacctatgagaagggaggcgaacaggatttcagaacacggataaatccatatatatctcaacgtttgaataatgcacctggtatatacgcattccggaataatgctaaagcagtatacgtgaatgcataccgtaaagagcaggaaggggaagtctataatgtgtatgtcaatgctgaaatacagtacgataagggcgaggatggaatagaatatgcagactgcaccttaaaaatccctgttgtggccacggaatcaggatatagtatcactgcattgcctatgtatatacaagataagaggaacagtgatgattataccttgcctcagattccgttgggacaggaaatagataccgcactggtatcaccctctattgagaacttcttatccgcttattactcacaggagcagagcatgattaattatctgcttactgcagatgcagaccgcagcaaatttgtagcaataggtggtagatatgaatttaagaaagttgaatctgtaaaagcatatcaaaggccagaagcagcagatatcctatgctcattaacagtccgtattgctgatacagtgaatcaggaagaaataagccaggaatatatgataactcttgtccaagaatcagataagtactatgtcaaggatatagatacaaaaatatattaataacaaattatttaattattaaaataacaaaataataaaataaataaaaagaaaagaggaccaaaatgaaattattagagaatacgagaataaggaaatgcataacaattttgctcagtatacaacttaccttgtccatggctatggtatcttttgccagtggcgcaaattatgcagagaatgcagctaaatgggggtttgaacaggcattttgggtagtactattcgttactttggttgtagcagctggtgcatggatgaaacatgctttatcaacagcaatagttaccgtggttattggcggcatattagcttatctctgtaaacaaccagaggtaatatctaccatcggaaatgcaattggcagtagagtatttgggggatgattatggataacagtgagcagaaaaaggtgacaatatatagctacagcaaagtctggaaagttgagaaacgtatatatgctatacagaacctggtgcttcctgtccccatagacccatggcaactgctatattttggtatcacatgggctgcaattaacttgatatttggtgcactgccgggatttagtagtatcccggtagtcattcggtcattattgattccctatctcatttcaaaatttctattaaccaaaaaattagatggtaagaatccaataaggtatatgtttggtatagtggtgtttttgttttctgaacaggaccaggcactggaacatttcaagttacagccggtaaaaaaaagacaggccattaagctatcctggaattgtagccagggagacaggaggtgattggatgtaccaatgcccgattgactattacattgataacctggtattcaatgcagataagagctgctgggctatttaccgattaaagggatttaactatgattatttaagtacccagggaaaggtaaataagctggtgcaattggccagggtatatagtggaattatgagctatgcacagatattggtgattccagtggaaaaggatgttcaggaacattttagaaatttaagggagcgtctgcaccggaatgacattttatatgacagcgcaatgcaacagatagaattgacagaatcatatttgagggaaaaaacagaacagttaggacgtgtaaatgattatgccacatactttattgtaaagctaagtgaagcttcggaatatgaggcagtagaaaagataagcgagttcctcttgtatttcattaaggacccggtcaatgcaattaatgtacagatgaatctggataccaaggatatactaaaaagtaagataaaagcttatgaaaagatggccaataaatggttggatgagaataaatataaaatgagcatggaagctgtttcaacagaagaaacacaatggttgttcagacgcattgcatacaggggaaccggaataccggcaaaattattttataagacagtaggaagggaaaaatgggaaccggatgtagatgaggtagtaatcaatcaggaaaggattgtacgcccttaccatagagatacggtatcactgtttgagggcagcatagaagcacaaaacaggagcctcaaggtatcaacaggattttctacgtcatatcagacattccttcccattgtatggcttccggaacaaaatgaatttccgggaaaggaatggctttatgagctgcaggtaagaaatttgcaggcggaagtgtgtatccatattaaaaccatcccgcacaaatcagccctgcatcagttggaactgaaaaagagggagataaacagtcaaattgagcatattgaagaggcgaatgctgatatcccagaagatttatatacatcaaaggaatatgctgatttcatggagcaggaattgaaagatgacaggtccccccttttggaaagcaatatcactgtttgcctatctgattcaagtttggatggattggaaaagaaatgtgccagggtaaaagaactgtacgatgatatgaacataatcattgaacgtccattaggggaccagcttaaattgtatatgtctttcattccatctgtacgtattttaataaaagattttgtaatgcggcttacgccggttacattagcttccggtattgtgggagtgacaagagaattaggagataaccggggcggctatatcggctccactggaaaagaaggaaaacccgtatactatgctccagagctggcctgtctccaaaatatgtctccagctgctacgttttttggagatttaggaacgggtaaatcatttaatgccaatatattgatatatcagatggtcttatatggcggctatggattgattatagaccctaagggagaacggtcgcactgggagaaacagttgattgttctacgtggtttgattagtacagtcacattaggagcagcagccagtgacagaggaaaactagacccttataacatatatccggatgacatacgggaagcacatgagcttacactaaatgtactgagcgatttatttgggctggacccaaaaagtgatgagtatattgctatactggaggcccaaaagaggatggagaaaagtcatggggcgcactgtatgttaaaactggccaaaatgttggaggcgataccagaagaggataatttacatgaggcagcaaataatctggccagaaggattatattatacagggataatggaatggcgggcctattgataggggatggagcagaacatgccattacattggataatcgcttgaatataatacagctgcagaatttaaagatgccatcaccagaaacaccgaaacaggattatacgagagatgaggttttatcggttgttatttttggtgttgtatctgcctttattaagaaatttgctttagtgaaacggccagtaccaaaaggtatacttgtagatgaatcgtgggcaatatcagcgtcaaaggaagggcgcaacatggaagagttcatatcacgtatgggacggtccctttatacttgcattatttacaatggccattctacgaaggacttgcctacagaaggaattaaaaactcaattacatataagtttgtattccgctcccggaacaatagggaggaagcagcccgtctattggattacctgggcctggaggtgacaccagaaaacatgttggtaattcagaatctgggggcaggacagtgcctgtttaaagatttatataatcgtgtgggtgtgcttcagtttgaccccgtttttcaggatttatttgatatcttttctactacgccaacagaagatgccgatgaagaaccggaaccggagacaccggaaccggaggcaccggaaccggaggtaccggaacctgagacaccagagctaccagaggataaaatcatttcaaaatcagagccactattagattttgagtttacagaagatgacttattcacaaaggaagatatctgatgaaaaagaaaatgtttttaatcgctatggccatagtggttccattcctactcatctgtattgttctgggaggtttagttggtggaaatacagaggttgtccctgcagatgaagaaacagcaatgaaataccaaatgtgtgctagtcaattaggtgtggattggtcatgggtgatgctgatagacatgtacatagccgaccaggagcatactgacataactagccagaatatggtctataccgccctcaattgccttaaagtgacgattgaggtgtatacggaagaagaggatgaggatggtgagacacattgggaatatgaccatacagattatgcatatggtgcagatgccataatggaatacttcggactacctaaagagtgtcgggatgtgcaacaggtggtccggacgatacaaggaaaaaattcaagtcaattccatatatctacggtcccctatgatgatttaaaggatgtactggatacatattacggctgctttgatgatgaagcaaaaacagagatgcttacattaaacgaacagaaatatttggtggagctatatgaggatatcataggggagtggtcgggaaccggctccggagatgggctatttggcgattatgagataggggatttggtttatccggaaacgggaatggaaataccattatactaccagtatcagcagccatggggggacgtgaaatttggcggcaatacaataaggacatccggatgttctgtcacctcaattgccatggtgttcagctatttaagggatagcactataacccccccggatattgtggcctggactggtaatcgttattacgtaggaaatgctggacagagttgggatatatttcccgccacggcccaacattggggcataaaatgctatggtttaggtacatccctgcagggcatgatagcagaactggcagcaggacatcctgttatagcaagtatgcggccggggacttttacccgggcgggacattttattgtattgcgagggattacagaggatggaagaattttagttaatgacccaaatgataatgccacaaaacgatttttttatacatcgtttgcaccggctttgatacagagagagtcaaaacaatattggagctttagcaattaagggggatgcagatgaaatacggaaacatttataaagtgcttatcatggcggtcctggccgcaataatattgtctttaagcatgaggctttttaaaaatcccgaagagagtaaggagccgattgtgcagcctgaaactgccgctgaattaacagaggaagatataacagcagaaacagaaagaaatcaaacaaccatggccacatttccagatgaggttgaggcagaaggggggaatacgcagccagaaatatattcgccgtgggaggaagaggactatacagcatgttactttacaaatacagaaaacacaattgatgtagacagtacattgccagttggcgcacaaggacgtttaacggatgatgcgcagcgttatttggacagtgaaggaatcaaggctatagagttacgctgtatagatggaacggtcataacggaagggccagaaacatccttccaggtacaatgtgatgacgtgggaaagactatcattgtaatgacatacgataggaatctgcatacgtggacgttcaagcgggaatgagggatacgatgagtcttgttaaaaaatttaataagctgcagattatagtggccatgtgtgttatgatttgtctcatggtaaatatttcaacggtaacagcatttgcagcagggggaggagcctttggaataacagatgaattggatggcctggaaggtgatgggaaatatctatcacaggaatacagggacaattatcaattagatattgaaaagttaggtataaaggatgctggttacggaatcctgaatgcaatttcaaatggaatatttagtgctattacgttcgtaggactagccagtattgcagtattttattatgcattggactttgatatagcggccctgttagagcctatgataagcagtatacaatcgtccttgcggttgaatgtattccttccaatatttcaattaatattagttggcgcacttatcctggctatagtacgttttgcccgaagagatttttccggattgatgggacaatttgggaaagttatatttgtacttttaatgtccattttgttggtccatgattctgctacatttctaagttacacaagtaacataactaaaagcctatcagtgcagattatgactggtgtcagtggcgttgatatagaaagtggaaccagtgagtatgcagcaacggcagctggggtgttgtgggtgtcattagtccatgaaccatggaagtccctggagtttgcaggatatgattatgccgatgaggacgtggaatttttcttgacggaaacggatgaggatacacgtaacaacaaggtacaggaaataagggaggataatccaaaagcatttagcaaatcaactgcagggcaaaggatgggacaaggggccatcatgttccttaccatgttgtttaaatgcattgtatatatcttaatagctgtgatactgctgctatttcagatatttacagtaatcctggtccttttagctccggtcatattattaatggctctgatgcctggctatgattttatgattctaggggtttggtgccgcaaaatgctggaaattcagataggaatacttgtagtgacttttttaatgggtatcatggtgttaatggaccagctattacaggatatgtcacacacctttgggtggtatgttgcattgattttgcaggtcgcaatatgtattggcctttactgtttcaggtatgaggttcttggcattctttccatggccactatggtggccggtaatccccggaggatgcgaaccggattagggtatatagggaatccgtatcgttacatggctaaaatgcaccgtaaagcacaaagaatgcaaggtagggacataggctttagaggactgcccggaaaatataaaagtcaagaagatggtgagaaatttgatagggatgtcgaaagcccccgtagagaaccggtagataatgagggacgcacagaacgaccatctacatatcaaacatccgtgataaagaaacgggaagggattcaatcacattccaggccacctgagccgaaattggaaacaacagggataaaatcaatgtcttattacgctcccagggagattacagataattggagggagttgtgggataaggcagagaaaccggggaggccgaagatggaagaaaatatcagaagaaagaaaaatgaatcctcagaacctatgtcccggcctgattcactgaatggaagtaatccggaaatgagggaagaggatggtgcatcgaaagcaagtgtgaaccggccagtgagttatcagccagaatccagagagcagccaggaaagaaaagggatgtggttgtggagaagcctacaaaggtccaggaacgtccggtaagctatcatcgggttcaggagggaggagagaggacggagccgaccggtgagagtaatcaaaggccatcggaacagacagagcggacatcaacacgtccaataagccatcaggtgatttctaaggatgtacaaaaggatttaccagctgcagatgaaaataagtcgcttaaagatgttccagagcgtccgataagtcatttatctatatcccaggtgaaggagaaaggggaagcaatagagggagcagagcaggggacagttgtccagcaacgtccaataagccagcaaaccactactacagaaaaacgtaaacatctggagggtgagcataccagaaagcaagacaaagtagtccacagtagacatccggataaattgcagggaagattaaagaacgtgggtaagaacaaagtaactgcggatgctatggaatcaacagataatccatcttcccgtccgatgagccaaccggtccggtccgaagatggtaaaatagaggaatttaaggctggcgaaatgtagccaggccgtaacacttaataacggggggactgctggtaacggtcatcctgaatctaaatatgaattaaaatgtgtgctgcgaaaaaaatagtttgacaattagtacagatgttgatacaatctgatttaagagttgtggatatcggtgggaaatttggacaagttatccacacatgaggttttagattttctgtagctatacactgtgaaatgagtgtacagaaattaggacagacaattgaataaagaaaaagagaagtaccaaatggtacctctctatgattcggttcctctctaacgtttaccagacggtagggaagcaactcaagtattcacacgatacaagaatcttttaaccgtttagtgcatgtgtaatgctcctgactagataatagcagagccttatgattttgtcaataataaaagcggaagaatttcatgtaaatgtaggcccgaatacttgagtattcgggctttttcgcgcttttgaaaagtgtatgaatttataaaattttcctgggaaggagggcataatgaagataaaatattctttattagataaattaaatagtttgacgaacaaagaagttgattttattttgtacgttgcccgttaccaggatgattatggctgcatccgtggcatgtattatcgtgatgtatgcgaaaatgcggatatgtgtaaacagacgttctacgatacgttacgttccctgcaggcgcaaggtatcattacatatagccgtgtaaatcaggattatgatattacaatcctggataatgatttttcgtacccaggtgcgtaccatgagggctatatcaatgtatcccggcaggtatttcatacccgccggttccatgagctgaaagccaaagaaaaattactgctgctgcattttatgaaaatcacacatagtgcatccggaagctaccaaataggaattggtaagctgtatacaaagtatatgcagctcctgggggtaactaagcgggtattacgtggctatttacattctcttaaaaagttctttgcaatcggcattaaagatggaaagtatttcatatcctacttgcggactgtatttaatgatagagttgagatatcggaaactgaccaatacatgaggcatttggtgggggtaagctgcagacgggcaaagataaagaattgtgcaccggcagccgtgaaggatgttgtgaccatcatgaagcaatatcgtaaagaggcccaggaaagcattggtagaagtatctttgagattgttgacgattgtatttgccaggctaaagaattgaatagtaagtatatacataaactggtaaggcacaccttgggattaatttggtctggccaggaaatggagttttaaggcttgtagtaaataacaagcctatttggcgttgacataacgattgaagtcatggccgtcatggccgttttttaagaagtaaagctgtctgcaggtgaaaatatgatatcaagggagggagcaggtaccaggaaaggggcttgctccctcccttatgccattttgatagtccaaaaataatgacgtttagaaaaaatagtccaaaaacaatgtagtcaagaaaagtatgtagtctaaaagctaagatgttaagaacatttattagtccatttttatgcacctaaaaaatacaaaaaaagcctttatttataagagtttcaaggcttttcgatggctagtatatctattctttaattctttattctttccctttatatatataatcttatctaaactaccgtaataattctttgtctcataatcaagttaaaaccaatttctaaaaactttatcgaataacaacaataacaattcttaacattccccaactggctaaatccaaaagccaacgggctactatccaaaagtcaagggtatataaacggggcaagccccgcccttgacttttggatttccgtgtgcttatccactcttaagcgatgatgaagggaaaagacaacctctaataaattccttatcatcacgtcatctagtatagcacacggaaccatagccctgatattcccccataaaaatttaagctcagaatcagctaaaaaaacaacctctcactcctaaccactaaacctctcaaacttcctaaaaagacttccaaagtagattcgtagaccaaagagcagaaaaaccgattctggggcattctggtgcgtcacagaggcatattacttggatgatgtcctggcccaaaatcacaccttgatattttaaagcagcggctccggatgatgaaagctggaacattacaactgcgatgcatctgccactcttctgcgacataactggtttcaatctttttcggaaaatctgtgattacagccttgtataatatacccttgtgacgcaccagaatgccccagaatcggtttttctgttatttggccatcgaatctacactggaaactgccaaatggcctatttttgaattttacacataatgagaatgaggtaatgaggcccgcgcttgatatagcctaaaaagaaatagaaataaagattacttttgtaggaataaaaatactgcaacggccaggagctgctgcagtattttttaagctttgaattgtttaaggaatatgtctatcacttttaaaaggtcatcttcttgtgaaggggtgagtccatcaagtgtgatagtagtacggttttccaggccaaggatataatcggttgaggtatgatataatagcgcaaactttgtgacaacatccgtggaaggaaatgacgtgttgctttcataattagcgattgcggacctggagagattaaggcgtgttgcaacttgtgtttgtgataatttgtacttttctcgtaatccctttaggcgtaatcctaaatcataggcctccataaccgtccccctttccatagttttaatcattttaaattgcatgtgctttttggtagtgacaaaaatgcaaaattttgcccttgttggtgagcaaaacatcctttgattacgttattgttataggagggggtgcaatatgcaacgattatgcagattgatattaatgctagtagtattgcttttgataggcgcatatattcagaaaccagaatatataatatatagcatatttagtggaagtgggggagacacaagggacacagaactatttgtgattgtttatcaaccatgggatactgatggaaccgtgaccgaaatcgtaaggaagcattgtacaatgaacggcacacctaacaggctgacgatacatttatatcacagtaagtatgcgctgaatcatggacaggcatattatacgaagatatttgagtactcagaagatgaaataataggaccgccaccagcatggtaagcaatttttcctatcaaacatgaagtcatagagccgccagaagccctatgacttcatgtaagaagggcggtatggagtaataatccatatcgcccttcttgtgacaataatttgttattataataatttgataacaaaataaaattttattaaaataaatcactatgtgaaccagtccgcaacaattttagcgttaagatatctttatttatctgatagataagtaaccaatcaggctgtatatggcactctcgcacatttttatagttccgggagttcgtaagactatggtccctgtatttttctggcagttcttgctcgttggctaatatagatataacctctgtaagtagttcgggattacacccacgttttaaggctaacttataatctcgcttaaactggccttgatactcaatcttaagcattaaggtcctccattagggcctctacagactcaaacggaccatgcatgtctatctctttatccgcattttctatagcagccatagttgttgcgtttggttcctggccctggcgcagggttacatcgaagggaaaaccctggtaacgtatggattggcgcaaaaatacgtttacagcggtagttaaatctattcccaagtcattaaaaatcttctgcgcttgtagttttacgtctttgttcattctgatattcatacttgtgtttttttcagacatactatcatctcctttttatagtattataataaataatatgcgcaatgtaaagacgttgcgcatattattttgattacgaagaaaaataataaaatagcaaattattaaaataataaaataacttattattgacatttgaccgatactgatttaaactatatatacgaataagttgctagtgaaatattttgttattaaattattttgttagcaaaataatttaataacaaaatattaataaaggaggatagggtggaaaatacagtttgataataaattatttttgtatattaataatttgttattgacatataaccgataaagtcgtaatctatagttaagctggaaaggagaactaatgataatcagatactataatgtgctttttattctggccgaccaccaagaaggtgacaaatttaaactggaatggctaaaagaacgcattaaaaatggtgataggatgaatatgcgggaattgtaccagtggtgccaggcacatgaaataaactatgtgactaaattcagataccgaatggattatccagtaaaagcgaatatttggaatctatatagttatctgagagcaaaggtggattatgagttgttcagatgaaaaaaaattggtgagattatcggcctatgcagagcattatggctgcagcttacaggggataaaaagacggtgccaaaatggagaaatgaaaacagcaacaaaaaacggaaaaatatggatggtagatataaacgaggagccaccagcagacaggagattgataaacgggttctttgttgattggagaaaaaaataataaaataatttattattaaaataatttgttagtaaagtagtttgttatcaaattaaaagaggaggagaatattatgattattgcaatatcgaaccaaaagggtggtgtaggtaagacaactacaacacacaacctgggggttgaattagcagccaataataaaagggttctggaagtggatgcagatggacaaagcagtcttacaataagttttgggaaggaaccatttgattttgaacatagtatatgtgacattttaaagagggacccaattgggatagaagaatgtatctataatattaaagacaatcttgatattataccaagtaaccttttcctggcatcaatggagctggagttaactggcaggaccgcacgagagcaggtattggccagggctttaaagaaggtcgaagcaaattatgattacatacttattgattgcccgccccagctatcaattttgacgcttaacgctttagctgcagctgataaggtattgattccatgccaacctacatatctgtcatataggggattagaacaattggaaaatacaattaatgacatacgagaattggttaatccggaattggaaatcatgggggttattgctacgctgtataaagttcgtgttaaggaccagaatgaaatactaggtttgttacagggaaaatataatgtaataggtatcatcagagaaacatcagaagcggttaagggaatatatgatggccttgcggtagtagaaagaaatccgaaacttccaatatctcaagagtataagaaaatcgcagaatatattatgtctatgtaaagtttctgcagaagcttgtgccacatataaaaaccaccaatcacaaggactggtggaaaaaatgtcgaaagggactatgcccctatcagatttattctaacataaaacggagatatacacaatcaatattttcagggaaacagaagaagggtaataccatggatgaaaagaaaattgagaagttatatgaacttatggaaagggctaaaaaagaacatgatgtagaagccgttgcggcattacgttgggcaatttttaaacttgagaattacccggaaatttaaacggagggtatatgtacaaaattatttttgatgatggagaaataagattgctagttgcaacagaaatagaaatctaaagaagaatgtgaagagattataagcgaacaagaaaaacctcaatgctatcacattgaagaaatgtaaagtgataaaattaagagttaggagattgtgaaaaatgaatttgaatgaaagagaacagaaaagggctaacagcccagttagtgctatgataggcgttaataagccagagaaagcagagaaagaaaaaaagcagaaaaagggtgagaaagaggggcttatacagcgtggatactatctcacaccgggtgttgctgctcaagtgaaaattaatgctgcaatgactggtaggagggattatcaagtagtacaggaggcgctggaactatattttaaaaataatcctactgaataatttaataataaaataatttgttatttaatgctattggattgtcctggagagaaaaggggataaagatgaagttaactgatatgtctgataaattaaatagtttaagcactgaaattaagaggatactatctgtatccggatatgaggattacagcgatttaagttgtgttgattatgatagctcatcttcggaagatttattgttaatggatgaatacaataagatagtggcaaaattgtcagatattaacgatacacttacttaccttaaaaggccgattaagtataccggtaaattgtataaagatagccgtggatattatgctattgatgaatatacatggaccagtggaagtacaattgagttcctatgcaaggatagttggcatatgcggaagggggagggagaatgggtaaacactccttattggactgtttctagcatagaacataatggacaggattattatatcgtataccataatgatgtgatgttgcagggccttgaagtacgtgttagatagcatgagggagaaacgagaatgggacgagccatagaagaaatgaagtacatgcagactaatacatattgtctgcatatatcaagggatgaattggaagcattatattttaaggccagttgtgtaagcgtgaccattgagcagctgttaaaggatatcattgctgatttggtaggaggtacctttacgcatggctcagatgaacgtatgtatgcagatttttggtacacacgttggggagctgaaacatatcctcataattttccagacgccggcaagtctataaaggccagggaattaaagggagaaggagaagtacgcattccattgcagttaacaaatgcagataccatgagattgcaggacaaagctaattgtgtaggttgtaacgaaagtcagcttctggaagcttttgtaatggatttgatatctggccggtttacgcatggctcagatgaacgtatgtatgcagaccagtggtttaggcgttgctacatgtttccggataagacttttattcgctatctgattatacgtgacaaggttgacgaattattagaggactatgagaaattaaaagaataccaaaatgattatgtacagatgcagaaattaccagatgtgtatgagccggatgaggtaatggccacgcaaaaagaaattgaaacgctcagtgcgtatatcaaggaaatatatgaatcttacttaaagagtttagatgatgaaccaccagagggctcattggaggaggtaataagtaaggtgcaagtctggaatgataaaaggctaaaattattaaagggtgaatatgaaatatgatatcttattaggattcaagcgatatttgcaggataacttgaatcctaataccgcaaaaacttattatagtgcagtaaaaaaggtgtttaataattgtaacatttcgtccatgggagatgtaccggaaagttacatactggaccagcttaaacacttccggactaaaaatgaggtaagtgccgccaaaaatggattaaagcatttagccaaatacgattcttctttgaaacttccagatgacgcagcatttaaaactattcagaagcgaaattacgtaaaaagtaagggaaaaatagttaactttgataccatgatgaaaaagaccaacgcttgcagggacccaaggatgaagtatgcatataggttggcggcagtcagtggactaagggtatcggagttggcggcattggaccctggagacattatatttcaatccgatggccgcttgaaaattcatgtaaggcatggaaaaggaggagtagaaggatgggttacatgcttaaaagatgattatctgtatgagcacttaaaacaccacatcgaaacattacagccaaatgaaagattattctacgatgaatcctatatgcgtaaatatgcctgggagcatgggatggagatgcacgattttaggcgggcctttgctgtcctgcaaaagcgggagctgttacaggatggatgtaaggcaaaagatgctgataagattgtacaggcgcagctgcgccattccagattttctaacacaaaacgttatttgtatgggcgtaagattatggccaagaaaaaagggcctaaagagaaaactcaaatagaggatgtagaaccaataactgatataaatttagaggactacagtatacaggagttttatgatttggccagtgggttagattccagggaccttaccgaccaagaaaaaaagtcattgtataattatatggggagtgagtaccgtgatataaacaaggtactaaacaataaggattttaatgtacccgattatatattacaggacattgatacaataactgaatgcctggaaagaaaagagatacccagagaggagattgtatatagggggatggataatctgggggtattgtttggggatgacggaaaaaagctgtcaagcgaggaactgaatcaaaaatacagcggtacactatttataagtgatggattttcttccacgtcaatggataaacagatagcaactgcatatgcgggttttgaagaagggattttgatgcgaattaaaatacctaaaagaatgcgggggatgtacctgggggcagtgaatcgttatcgggagatggagttgctgttacagaggagcagtatatttaaactcgatgcgattgagaaaaagggtgatataacctatgtggatgcttcacttatataccaagttaagaagaaaggaaaaatgtatggaaaaaaacataaatagtcaagatttaaaccaggagaggtttaagctaaaatcaggagatatgcgcccaatatcactagatgaatttgaaaaattagtgcggaaggatgagtctgcagatggtgatgatatagatggtgatgaatagggaaaatatacatattgcataaaaaggtatctgcagataagagtggagccgctccaggccggggccgatgtatgactgctgcagcttaaaaagcggtcaattctttgtgcattctgctatattggcaatattaacattttggcgaagagctggaaaggaaaatatgaagtgtaatattaataactgtggcggcgaagttgttgacgatgagccgcattacatccctttgggtaaggatgtggttttgaaaattactgatatgcgttgtaagaaatgtggtgctgcatatgtcggtggaaagtatcaaaaattggagagaatccaaaaccgagaactgtgtgacaaactgtatgagttttacgaaggaaacttacacagctaaactgatattttggtaaaaataaaaggtaccaggatgaaatttcactgataccattttactatgaaataaaaggtaatttttattaccaaatcgttacacttaacatatcatttctggtattaaatgtcaatattaaaccaccatatagcaagtgaggtttataaaaaatagtttgctaaatccttataaaatcaaggttcttgagacaattcttcatatcaaaaattttccaatatcaaaaaattcaaaatacataggttgcatgtaatattttaaaattctatcgtattatataggcggtctttgtcggattgtgttatcccaatatacttcattgtctgccggactgtagtatgcccatatacttccatgattaatgcaatatttttggtttctttgtaggcatagtagccccaggttttgcgtaaagagtgagtgttgaaattatcaatatgtagggccagggctgtatcttgaaaaacacgatgtatttgtgtagtagtgaccggcttattgggggtttgcccagggaatagaaagtcatcatattctaagcccatctcttttatatacatgcgaagagtctctttaagagggtcgtttattgctatacgctgcttatgacctgtcttatcttctttcaggtttatataccttctgaaattaccacttaaatgcatgatatcagacacttttaatggtaggacatcactgatacgcaatgaagtatttaattgtgtttttgcaataacaaaattacgtaggcgtgcttttctacgagatgaactattctcctttaaatatcccaaaatagcatgtaattgtttcttatttcttatcggctctgtagtaatattcatcctcaaaaactcccatcataagatgtaatatattcatcactatttgacgaatatattacatctaaaacacctagttttaaacacttgaattatattaccaaagaaacctttgaattacaaggttttataagttttttaaacattattagatgtaataaaaattaccttatattacatgaactgaaaaaatggggtgacagaatgcttacagggatggaggtacaaagagaatcagggcagagcaaaggtgagaatagtgaggttgtaaggctcaaaaagaaaatcaatgcactgatagaacttttagaaaaaacacagagagaaaagcaatacctcaatacttttgttgatagctatatacagaataatgcgccgttggaatttaggattaaggaagtgatacatgtactgaatatacttaccaaggaagccaagtggcttgattctgcctaccagacatcaagcagcagaaactattaccgtattaagacagatgattttgaggatattttagatagagcattgataaatattcctagaaaaaaaatgataaaagtcatggcaaatatagggatattgaaatgtgatgatggacattatacgtactcagctacgatacagagaaagatgtacagagtgtatatgctcaaaaaatcagcagtaaataccttgataggagaacaagaacaggatgaataagggggatatatgtgtacaggaatttgtgcgggtggctgatttcctcctcaagtctggaaaggtaaggatacatagggggtatatcctggctcccaggaatgtaattgataggctgctggccaagaatcaatatgaaacgattgaaactaagctccaatactggaagaagctgcactggatagatgcagatacagaccgattcacaaaacaggtatcaatagaaggtcatcggcttcggatggtgaaaattgatatccaggtattccagacattgggcgtattatttgcagatattctggtggagaagtagtaggaatctatattgtcagatttccccggccaggaagccatatataataagaagtttctaggaaatctacaccgtcacgataataggctacaaatatgtaatatttgtagctgtagtggtaggaggagaactataagggacctgggaggcagcagcgtaagctggggccggtatagagatgggtgatagagttggtgtggggatagatggagtgagatggatgagtattatggtaggaatatcagccaacaggaataggtaaaagagcagagccgcagcctggggggagcagagccacagcccgggggagcagagccgcagcccggggagggcagagacgcagcccgggggagcagagccgcagcccggggagagcagagctgcaaccggaagaacggagctgcagccggtagtgccgggaatggctaaattaataataaaataatatgttattaaactatttttttatcaggagggacaagtgacatatgagaataagaggatttaatgaaaaaaagcaggagtgggtaattatagaactcacggatagtggagctatggttggtcttgaaaattggtatgatattgcgagttgcagtgttggggtaagcacagagaaaaccgatatgcaaggcaaagaagtatttcagggggatatcatcctgtcctatagtacagacattgaaatggaaattaagtatggatgttaccagtcatattgcccggaagataaatgtgtaatgaataatataggtttctatgcagttggtgaaacggatatgcctatcgggccacttgatgagtatgcaattgtaattgcaaacacatatggtaaatagatatggtgctgcatatcaaaaagaggatagttgtgagcattagaaaaagtacagttagatttattctggttttgtattttatcctgcttttttcctttgttgcatatctgggagactgggggaactggaagcaggataaatatagtgaaacggcatatacggtggaagaactgaaaggcgaggatagaacctttgtgttaccgaaagactaggagatatgaatatgaatttagaaaatgccaagatgaactaaagactgaggaaggaactttgaaagtgtatggctcacttttagatacacttgcaattaagatgggatttgattacctatccaatcttcggagattagatggatataaaaaaatccaattaaggaatttaataaaatcaatcccggccaatgcattttcagaatgggagtggaaggatgctttgcaatatctgactgggacgacatttattcaggatatgcatagtgcatatgatgtccggcaaagattgttggcagcactgaaagaggaaggaacaggaggggaatggaaatgaaaattagaaaattagggattattttattggcaacaattattacagttaccaatatggtagtttatgcaaatagtgcggatgattcgattatacatagttctgatgatgttatcaaagaggatatgaaaaataaagagatggaaaaaaacaaagaggagtatccaaaaagtacgccatcggaagcaaagcccaagccgtccgaagaagataaattcgtctccacgccaactgtatctattccatcggaagctacgccatcggaagctacgccatcagaagcagtaccggttgaagtgatagagtttgagagtatagagccggatgaagtaccaagctggtatacaaaggtaaaaaggaggctgtttggtggaaagaaacattatcaattcacagaccggtatggagaagaacatcaccgaatttatggatattatgaggaagaagcagaagctgcatggtatgaatgccagccggatggaagtgtaaccaatgagagtttttggattgatttggagtgggaagatttgaatcttgcccccttgcgttgggaagctgctgagcctcaagcagatgatatccgggatttatctgagcgaatatttggggatgcagagatgttaggcattgatttggcgaaatcaaaccatgaagcagaaaattatgatggaaccatgtacgatatttggagcctggatgaagaggaactggctgaactatattttttctatggacatgctgtaaatgggatattaccgggtgaaaatacatggtttgaaagtacagaagatggtcagatactggatgaggttcctgatttggtgctgtcagttatgtctgcagatgcaagggcaatagatgccacggcaaccgaatttgagtttggtcaaacctattttggcgtgaaggaccatccaacagggactctttatataccgtgtgagttaggggcaaagtataattggcagattacagtcaatgtaaagcgtgtaagctcaacgggaggaagcagccttaagtattatcaatgctttaaaaaggatggcaatggcccctggtatcttgcagatgcggcatctggacataccggatattttcccgtgacagtgccatatggtgcaaatagtaaatattattataccggttcatcaagatatctgactgcggaagaagtgaatcagggttggtataaaacggaatcttccagcgaaggagaccggattaattatatagacccggagggagattccttccggatggcggcccaacatcaatcttttggagattggtatataacaaaagaggctacctgtacatccaagggaacgaagcagcggacctgcatgggatgtggagctgctgagactgcgtatattgacgcattagggcataactgggaagcggattattatacaggtgccaataatggtacgtattataagcggtgtaccaggtgcagcgagaaaacggatgtaagaaataatccatatacaattacttatcatgcgaatggtggtaagggtacgatggcggtccaaaactgtacctacactgcaaaactgaatttgttatccaatacatttcaaagagattattacacatttaaaaattggacaacagagccggatggtgggggaaagatatatagtgatacgcagccagtaagtaatttgacagctgtatatggagggaatattgatttatacgcacagtggcagccaaaatcatataacattacatttgatgatggatgggatggtacgcaaaatataacgcgaagctatgtgtatacccatccattcggtgaactgcctgtatttaagcggcttggatataccctatcgggatttttctcagaaccagaaggaggagagaaaatcacagcggaatcaaaagcgccgcattcagacacaatctattacgcgcattgggaagccaattcatatgatattttcttccatacaggaaaatcctactgctggagtgaaaagaagagggttacatacgatgggaaagtaggaattctcccggcagcctccatggaagattttgaattcttgggatggtatacagaaccatacagccaaacatatgtagagggaatcatgtgtggggatgccaatcctccagatgacaaacagataaaatcagaggatgtgtataggatagcaggacacacacaggcttatgcatatctggttttgcaatatgaagaactggagaatggtgtgaaccgcaggccaggcccagatggttatatgaatacaaaggacgataattattatctgaacggagaagatggaattgcgggaactcatgatgatgagaagctgtatccaggggaagatgggaaatatggaacaaaggatgattattatttagataaagagggccataagatatatcccggaaatgatagtatctttaggacagaggatgattatagagataacggggatgggacgaatacacgtcctggaccagactgtaactttaagacagaggatgatgtggaagcatccaacggtctagatggtttgcctggaactatggatgattggattgataataatgaaaactatccagatacgaatttaaggccagggccggatggagtgttcggaacgggagatgatgaagtgtactggaacgggccggatggaataccaggaacggaagatgatgagccggtgcatccgggcctggatgggaaactggaaaccggggatgactgggtagaaaacggccataactatccggaaaccaatctaaggccagggccggacggagtgttcggaacggaagatgatgaagtgtactggaacgggccggatggaataccgggaacgggagatgataagccggtgcatccgggcctggatgggaaactggaaaccggggatgactgggtagaaaacggccataactatccggaaaccaatctaaggccagggccggacggagtgttcggaacggaagatgatgaagtgtactggaatggaccggatggaataccagggacggaagatgatgagctggtgcatccgggcctggatgggaagctggaaaccggggatgactgggtagaaaacggccataactatccggaaaccaatctaaggccagggccggacggagtgttcggaacggaagatgatgaagtgtactggaatggaccggatggaataccagggacggaagatgatga

SEQ ID NO: 578 - DNA, 13310 bp, Enterocloster bolteae
  source 1..13310: mol_type = genomic DNA
ctcggcaagtccagagatgttcttaaatatatttgtttaagttttatgtcttttttgccgttattttatttcagttgcatatattattttggctcgctgattttctgttgccaatttgttgccattagattgattataaccctgtttctctttgaaagcaactactatgtaaatttttccacgcctcttgtaattcttctttatttgtttcataccaatcttttatttcagtgaccatttggtatgtccatttcttcttaccatctttatataagtttccatcactcattttaaatactgctgaaaactcattacaacttacatgaaaatgtggtgggtgatattcaaattcattggcacgtacctcaacaaggtactttcttccaattctccatgtctttatttctggctcacgcttccaccactctaaagaatatatattatcaatattatacgtactctctgtatcattatattcaacacaaagaggaagtttcatacgagaatacgctggatgaataaacgatattataattccctcgttttctattgcatttgtaaaacaatttctctcttcaaaatattctctatactcttcatcaaattgatactcttttacctttaaatcagaagcagaatcggcaccataaaaaggttcttcgtaagcaatcttcattaactgcatttgtaactgtgcaatttctgatgaacgttcattcctctttttaggtatattcgtcaagcatacccctttacagatttctgattgccaaaatgtatccttcttccatatgatattttcatttttgtcttttattttatttaaaataggaaaagtataatttctaagagattcaaaaaaatcttccacactcgcaaattgtcctctcaatgaatattcattcaaataataatccattttctttcgtagactccttttcctacaatccaaacattctattcaagtcaatttcaaactgatcaaacaaatcatctatatccatgtcttcattggttcctactatttttccatattctttaaatataattggattgcactgtgtctcatattgttcattcattgcaaaaaaattaacagaaatatcttcttgtttcatacttccattggcaacgcctactcttaatccattaaagatatgatcactatgtgtttcaatgaataattgacggcctgattgactaacaaaatacaaaaattcacataattttgactgagcttttggatgcaaatgaatttctggattttctataattataacagaatcactttccgcacccagacacaaaattataatacttattaaataactaattccagacccaacatttaccggtctacagtacaacgcttcggagactgcattagcgggattattgttatattttacctgtagataatttgttttttttaaatcacttatatacaatgtagtacctataatatcattcaaccaataatttacttgatccaataaagtattagtaaaatctgtatcctttacaacaagattatcatcaactatcataccctcgttttgtaataaataggctaatgcgtactctccatctattccaaagtcactatcatttaacatatttttagcatatatgtcattgacacccattcgatgacaagacaaataatgaaatccaaaatcctccaataacaaatctgattgttctggatcatcatattctccacccaataaaagttctgtcacagatatatcgtccgaagatgtacatactttatatgcctcattttccttgtcctcaacaaattctacccaagctggcttcgttttgcccttttctaatatttcaatctttattgaggaatttggcatataataatttcttacttctctaaaatctcctatggaaatatatttcccattaagactcctttgagtcaatgctaataatgcatgtaaaaatgtggattttccagatgaatttgttcccacaaacaaatttaattttgaacattcaacactcaaatctttgatagattttaaagccagaatatgaactttatcaatcatcgcttatctccttacataatttttccatcaattgaaatcttccatatactttcatagtattatccctactatttccgatataatacaaaaactcttcactacttattacagtttttattttctctaacagttcttctcttgatactgcaatattattctttggtaataatgtcataaaatatagtgtagtttcaaaaatattcatattaattggttttgattcattgttttcttttctaaatgcaccttttcctaaaatatctcttgccatttctaaactctttatagtaacttgtctaatttcttctaattcttccaatgatgactgatttaactttgtcaatgtagtttctatcaaatcgtccagattgcctgtatattcatatttttttccatctttaaataacaagtcattaaaaaacaaataaaatgctaaaaatcttgtaactaaataagagcctttcatccttcgatcttttttatactcaatacgtgtagtttgcaaaaattcctgtgatgcaactacttcagttatcatatttaaccctctgccatgatacagagcatttctaatttcttgcttatttaattttgttccccccctattaactctatcaaaaatatcaaataatattttgtccggcgtaggtggtaaaatcacatgtgaatatacttggtaatcttccaactgagactgatatattcccaattcatctaccaaatccttgaatttttttccattcaaaaatttcaatatctttaatgattttaatggaaaaccatcacttaaaaaatcaaataatgttgataatctttgctttccgtcaaccactacatatgtagaattgttctgctgtttgaaataaaatattggtaatggtaagcccattaaaatactttctatcaattcacacttctgtttaggaccccaaacttcatttctttgaaaatcaacttctaatatcaattgctttttcttatatttcctgtaaagttcatatattgaaaaatccttttttgttaccctaacagactcaaaaattggcttttcctcatctccaaagtactctaactcatttaattcttcttcattttccaataaaacttcatcttctattgacatttgactcatccctgcctcccattttaattaaaaaacacaatgtatcagagcacccgaatcgttatcatctcatcaagtccaatctctccaatatcacattcttcttttccacgaagatatgtctgcatatggtaaaacatcatacactccctaaggtatttcaacaactcttgtgtccgacgtttatatccatatgcttttaataatgtccgtagtttcattctcacataatcttgtccgtccaaataaagaatctgcactcgtttcattttgaaaaataaatcaatatcaaaataatccgtaatgaaggcttcttcttccatatccttaccaaaagaatgaaaatctttctgaatagttggaaactccttatctatttctggtttgtcgcacaaataatctgtccaataatgcacatccaaatataattgacgcaaatttgttcgataatatggacttaaatattgattatcttctttccaaattttttccaacatgatactcgctgtcttagttccaatatccagactatgtatgatacaagcaaaatcaaatgaatcataatatagctcaatcaattttatcccccttcaacccattacattgtctacaaagtatctgcaaattctctgccacagtttttccacctttattcatcggtatcacatggtctacctgaaagaaaatacggtctttgccttttgctccacaacaggcacaggtataatttccatctgtatcttctgatttagcaaatgctgtatcccgaagatttttttccagttccggatttacctttccaatctcgaacaatggtaaatcctccagttttctaatacctcgctgcacgttttcttcttcgtcataaatatgcggattagacagttttgttaactctatatccagttgtctccagaaatacaattttcgtccaaaaaacaattttaacaaattatcatcactattttcccataaggcatttacatattctgttttctgtctctgccccatatcctcatcccaaatatgttttgcaatcgcagcaacatctaacttgcttctgtctatatcatcaaatgaatagaactgtggcgaagtttcgtactgggcataatatttcaaaattcgtatcacatctttttcttcatatggtggtatcatttcgcctaagaaaaacgtgtttctacattgctctgccatttcttcaagcaattcttctgccggatattcctcttcacactgaaaactttggaacagacttggtaagcctttcatcaattcttcatatgcttttttcgtactgtcatataccattacttgataggaagaatccactccattttcttctaaataggcaaacgcatacattccaatcggaattctttgtacaaatggtactttttctaatactgtggtatctacagaatcgtcaagcacagaagcaaactcttctattttagaaatcgctatcatgcgtaattcatgcttcatatgctctgttgaattatctgtaaattcattatttccactgaacagactgtctggatttacccatgcaatatgttcattccaattatctacaaaagaaactatatatgctgaagaagttccgccagcagcttctcctctaagtgcccgtcctatcatctgtgtcataaggattgtagaaacagttggtcttgctaaaaatactgttttggtttgtggcaagtccactccctctgtcaaaatatttacattcacaagtacctttacttttccttctctatattcttctaatttcctctcgttgtcttctctgctgattctcactcctgtcacagaatcttttacatcagacacaatgaactccgactttattccctctttattaaacaacgcacttagatgaattgcatgaactacattgattgcaaatactatcgtctgtccatactctttctcttttgccttgtatgtctggacaatcaacttgtttcgtgctgcactatctgccatttgtcctgctacatcttccggcaatacgtccaatcgttggatactctcccaaccattcaaacctaatgattctccatacatttcatctgtgtaataactttcaaaaataggttttgataaaatgcgtcgatttatcaactcttttaaccctatctgatatgtaatacctatgtttccatgaaccgcctttccaccttgtaaaccgtcctcataaatttttgccaaaagtccctgttccccatcagcagtacggaatggtgtagcagtcaatccaatcaattttacatttgatacctttgtttttacataatcaattacttttcgataagttttagcagtagaatggtgtgcttcgtctacaattaaaaagatttccttttcgccctcgatccatacatctaagcactgtaaatttctacctatgctatccttgctcataatcaacaaattgtccgtgggttgaatatcaatagttctatcatgggtagatgcaccagatataatcctatactggaaggacggaatatgtggtattacctctgaatacgcaaacttctgaaaagattctgctgcttggtcaagtaacatctgacgatgtgcaatccataatattttctttttctgatccagtgcatttcttaaaagccacatagaagctgtgtacgtttttcctccaccagtaggaagtacaatcatagtgctgtacttcgcatttttattcataatatcgagattttccattgcacatttttgatgttcatatggtattcttgcatttgctccctttttgggaaacacttttccaaatgactttacttctatgtaatctttttccatcattcgtcccctccaaatttattatattttacgcatttaccattcgttgccttttctgtgcttcaatcaaggtatctcgtaaatcagtctctatctctatcattttcacttcaatatcgaattgtctgatacattccgcaagaacagatgtaccttttaattttttcatctcatcttcatcacatactacaataatttttctgtatatctttccctcaattttttcaaggagaagcattttcagaatatcatttgaaatcttattatcctgagctttcttgggttttccaatatgtgcaaaaatttctccaattatcccatccgctttagaataaaaatcgggttgcataaatgtattgcctacaaagattttcgcattttctaccagctctatgcccaaccagtcatttaccttctgaaaaattacctgctctgccatttgttgctcaatagaacttgatttttcttctttttccatgacaaccctcctcaaaattgtaataaatacataaatagtttaccacatacatttccatagttccattataatgcgccataaaatcgtaaatagggcagtcactgaccgccctctaatctacgcatatacaatttctttcagcactacttcctctgcacaatgtcggatattattacacatcctcacccacaacatctgattctccgctttcaactgttccgtcgctccctgcttttctttcatctgctccaccagtctgtccatcatctgattacactcctcatcaatctgatgcagatgttcatttaacttcccggcaagtaccagctccaaatacaagcctttccgatgctctttcaagtaagcttttctcaacattccatattttccaatcggatactctgtctcttccgggagatacaggtctggataatacagatcgtcctctcctaaagtatagccaattccattttctcccataatgtgtttttccatgattgtcctcctaccttgctccccggtctttattctgtttgcgggtgtgctgtttatttttctgttcattctgtatttcctgtttcttttctgccagcttcgccctaatactgtgtgctaatggctcttttcctgtttctttcttccatttttctattgcagttcgatactcgctatactcagtttgagaaactttaaaatctttcaaaaattcctgtacgcttctgtaaccgattttctgtacaatccttggaagatagtctttcatattcctgatctggcttgtcagttcatcaatttcttcctgcaatgcttttttcttccttcccttaaaccatcccttgacttctgacagttcttttttctttgcagaaagctgtttttgtttctgttgaattgcagtattttgttcgtccagttctttcttgactttgaaaaatttcggatattttgatgcaagccttgtcatttctggctgcttcggttctgccttttcttcttttatcttcacactttctggtacgatattttctgcaatcctctctgtttgctcaggttccgttgttcctgcctgtgccacgttaatctgttccgacacttctctggattttttaaacagcacactttctatcaaaaattccagtgtttcaaccgccactgctataactctgccaaataatcccggactgtttccatgactggcaatagatttcttaattgattcagtaatttgttttcgcttcacttccaatatctgcggttctgatactccgctgatcaatgccatatcaacagctctgttccattcctgacgtttccgattatcgacttctatctcatacgcttttggattgttctttccaattttcttcgttgcaagatacacgccaccacgctcaaatacctgtagtttctgtttctcgtcctgcacataaatattgattaaatctgtataagaatgctttacctcatccagaaatgaattactcttgaagcgttcctctttcactgtaaacaattttttctcatatacttcaccttttttcacgatactgcagccttctcggatctcgccatcttctcctaatatctctttcttggttcggacatgttttccattttcatcataaaacatatttctgctggcaatcttaatgattggttcatccaatagcttccgttctgcaaatatcaaatgaatgtgataattggtctttcttttattgtggtgtaaagcagcaatacactctgttccataattctgtttaaaatgatttgtaaaaagttgcaacaatctgtctggctgaaattctgtaaagctctctggcaaagcaatgatcaattctcttgcctcaatacattttccttctgttccgctttttttaaattcttcctgattacactttgcaagttctctccagaatttccgttctgtagtttcataaaccgcataaagattttcctgttttgcatgactggatatataagtgattctgccttttacattgcttagttttgtcatttgaataaatgaatttcttccgataggcactccctccttgtcttcggcaaagtaaattctgccatattatttgtgagtggatgcatcggcatccgtttacgaactatccgcctgtcggtggaacagctcccggcagggcgaaataccctgagtacaaatctttgatttgtgcgatgggtgtatttcgctctcaaacgccgagggctttgtgagatgcttcttacatctaccacaacttggctttcgcttttcattttgggcgtatccgccctcttttttgcccgtatccgggcttattttttcacgaacaacaaaccgactattactcttcctgtctgctttattccggtatccttgcccgtacatactccagatctccacaatacggtgttccaaccaaataccattccctcgccaaattcatttccattcgtgtctttacccactgatcatcaaccagaacttccaggcattctccacagtgaaatcccgtatcaatccataagtctgatgacaataatccatatcttttgttataactgttgtaacctaatcttccttctctcattgtgtcattctcccttcatttatcttttccgcagggacgccctgaatcagggcccccttttgaaaatatccttgcttcgccagccaactcccgactgcaccttccctgttttctccttgtctgctatctacaggtgcgtgccacgctcctgtcattaggtaatcaagcagaacctttaccatcgaaagtcctcatgcattccgcacttatccaaatactcttgtcttgccttttcccgttcttcttctgttgctgctgttttaaaggttgtataaagttctctttttaccatactgtctaatttttccatcaatgcattttctatctccggcaaatattcctcgttcccggcaagatgatactgaaacaatgccagcaataaatcttttggtatctgtacctgtgattttctttccatgtttctcctttccgtgacggtcgtgacgatagtgacgatattttcactaccgtcacgctatagaaaataccgtcacaaccgtcacatatcgtcacgcttgttttccgacaaaggttaatctaatttttcttccgtcgtgtccccgctctgttttatactggattccatattccagaatcagtcgttccaggctgacatttaattttcgtgataaggcgttcggctgcatttccacttgcaatacttccacaagctctgttgctgttcctgcccactctggcgtaatttctgttacaagttctttgattttttccaataatggatcttctggttctttccaaagttctgtttctgtcttggtaagttcccagacacatctctcccggttaaagttcaaccacagtttctgatcctgctggtcacgccctgccacttccagaactgctttattatctgtccgtttttctttctgcatgacgaacgctccatccgcagcccccagcaatccattcgtaccggaaatcatatcaaaactatcggaagattccatttttcttgtatgatgcactaccagaaaacagatcccatatttatcactgaatgctttcagctttgttacaatctcgtaatcgctagcataactgaatttatctccaccgacctctcgaaccttctgaagagtatcaatgataatcaatcttgcatctttatgctctgtcacaaacgttacaagctgtctttccagtccgtcattaagcgatttggattttgtagcgaaataaaaattctcactgccttccattccaaacatctgtgataatcgcttctgtagtcttgcataatcatcttccagtgccagatagagaaccgttccctgtctgactgaaaagccccacaatggaagtcctttactgatgtgatacccgatctgtgccatgaaaaatgatttcccgattttcggtgaacccacaaacaggtaagttccgttatacagaagtccatctacaatcggcagttttggcggatatgcggtatcgtataattccatcatagaaactgtttccagatcattcggattctttttatttgctgattttgctgtattttccgcactatttgtggcttgcagattgcccttgccgggcaaatctgctatactttggttggttttaaaattttgtaatggctgttccacatctgcgccaacagatgcaatcggagcagtcattttttcttttgctgtcattcattttcccctttcaatccatacaatgtctctgcgaccaatctcagggtacttaacaactcttcattttcttcactgcattttttcagacgtttcagttcttcataaatctctgccatctgatttcgcaatgctttatacactcttgggttcccctgtaccacaatttctcgatcagttaatcgttttgtgatataatcctgcttgctaagtcctgataatcggacacatgcatcaatctgctctgcttcttccggtgatacccggaatgctacgattttgtttctccatcttcctttactgtccagatttttctccatttgatttttccatcctttcaatatccagctgtgctgccatctgtgtctgctcacttggaaacagatgcgcatatcggtaagtgatatcaatactctcatgtcccattcggtctgcgattgctaataccgtaaatcccatattgattaacaacgacacgtgagaatgtctcaagtcatgcactcgaattcgtttcaccccagatatttttgagcctctgttcatttcatgatgcagataagatttggaaattgtgaaaatccgttcgtcctctttcggctcatacagcattttcagataatcctgcatctcatcacacaaaaactgcggcatcttaatggttcgattactttttaatgtctttggcggtgtaatcacatcttcccggtgcagtctctgataggacttgttaatccgtagtgtatgcgtttcaaaattgaaatctgccggtgtaagtgctaataactcgcccatgcgaagcccacaccaataaagtatttcaaacgcataataggaaacaggcttgtccatcatggcatctgcaaatttcagatattcctcttttgtccagaacagcatttcccggtgttcctcttttcccatatttccagctttctgtgccggattggatggaagatgataaaaattgactgcatggttgaaaatagcacttaactgactgtgaattttctgcagataagaggatgaatacggctttccgtttggttgccggatcgcaagcaattcattctgccatgcaataatgtcccttggctcaatttctcctatcttacgctttccgaaataaggaagaattttagttctggcaatatttgtcttcgttccccaggtgttatctcgaattcgattttgcatatcctccacataaatctcatagaaacttgcgaaggtcatatccagttttgcttcttttttcagcaacagctcccgttcccacatcaacgcttctcgttttgtaggaaatcctcttttggatgactggtgcgtttctcctgtccagtcggtgtaacggtataccactcgccactttcctgtgacattgtctttgtaaatactcatacgatttctccttcctgttacacttcgctgtaacacacttttttgcggaaataattggtgtttaccctgcctgctaccgtaagataacccagcttctgtaattcttcatttagctgtttgacaatcttataagcataagacttggaaactcccagttccgctgcaacttcttctactgtcataaaagttctgttcgtcacatcgcatctctcctttctatcttaacgcattttgtttaggttgttacatttgcatgatactaaacatattcatttaagtcaagtggtttcgacaagaatattaaatttttttgtttaagttcttcttgctatccaaaattgctcatgttatactgaacttaaacagaattgttttattctatatcacaacaaaactggcaacacacgaacgtcatatcatgaaggaggcaaacaactatggcaatcggacaacgtatcaaattttttcgcaaccgcaaaggcatgacacaaaagcaactaggagagcaactgggattcaaaggaaaaacctcagatgtccgcatggctcagtatgaatctgaagccagagttcctaagattgatcttgtaaaacaaatgtctcagatctttggtgtcaacactcatgctttaaccgtgcccgatattgatacccatataggtctgatgcacacactatttgcactggaagatatgtatggtctgaaggtaaaaaatgtagatggacaacctcatctctgccttgactcttccatatctgttcccggctcatctgtcgatgaaatgcttcgtgcatggatgcaacaggctgacaaactgaaaaacggtgaaatcagcaaggaagaatatgatgaatggagatataaatacccggaactggatacttaccagaagcgtgccaaggtaccatctcaggaactgagtgattacctcgtaaaagaattgactaaaaaagaaaaataagagaaaagaaaaaaccttaccgatattcagttttttacttctgaaaatcagtaaggtttctttatatacgttatgaaataaaatttttatcttttgaataatcgcaaaatgttgccattttgttgccggtcactaaacaaatctgtttgtaacccgcataaatactgtgtttttatgattgcgtggattactcaaactc

SEQ ID NO: 579 - DNA, 7241 bp, Enterocloster bolteae
  source 1..7241: mol_type = genomic DNA
ccgcatttgtaagcatagatagcaaggcacatcaaaaagaaataccgatgcccgccctttatctctccgatctgccgcagccaccaatggtagagcgcatacggatcatcaccatgcacctttccggcaatatcccacttcttgcgtcctttctcgcctctcacaacaacacgctcataccactccggatatgcctccctcgcctcagctcgtgtcattttggatgggctgaaaggcttattgacatccaccctgttttctggctttgcgtaggcgttcagataatccagcgttacccgttctccggtacggaaagcgaccagctccgtcccatgcttgtcattgatgctgcccaccatgcggaagctctgattgatggattgatactggatcgccttgacctgcgaagtgctgccatactcccatagccggaaagtgaggtcatatttcagacttttaagctgaatttttatattcgggtataggtcaatcggctgctggaaaacatagtagatatgcagccctgtccccgacagaacaaggaaagtcggcatcggcaaccggcgcactcgctccggatcgccgccaaagcgcagaaagaggttgcgcagctcggcaagacctacgccatccagatcgaagatcagagcatacatccgctgggcgttctccagcctgttctcctttctgcgatatgcaagaccgctgcacaaagtaaggctgttcccctcgacaaactccatgtaatcctgttcccatgtgtcgttatacatcttcctgcgccggagcttcttatcctcgctctgttcgtcccgatacagatacacagcgttcggatgggaaaaatccgtgtgccgttctccggagttctcattgtccggaaacagctctttataaaactcatagcctccgacctccggatattgtgcgctcaaatactcgtagcagcctcgataattctcggtcatattaccacctcacaaaagaaaaagtaccaaaaagaaaatccgctgcggcggggatcgcctgcgggcgggaagggggaaaagggggagcaaaagagcggcggctacgccgccttaaagagaaagtcacctcccccttttccccctcgctgcggggcattgaaagtgccgccactatggaaaacccgatgggtttaccacagtggcttggaaaacctctaacgaggtttaccacacttccaacacccctccgctcaccccccttttcccctccgactttctccctttcagagagaaaaaatataggttgggagtacccttacagggggcttagattatcaatacagcaattccctattttcagttgttattatagcctgtccgaaagagattttcaagccctccggacaggcttcttttacagctccatgccgcccattcctcgctggtgctgctgttgctcctgctgctgtccaatctccggatcgggcagcagctccctcgccttttcaagcagaggacgcagacgctccggcaagtgttcttccaagaagtccagcatccgaccgatgccgtccgtcagacgctcggtgaagctgcgttcctcctgcagctcggattgcagataatagttttcatcgcgcagcctccggttttcctgttcaagcctctgctgccgctgcgcttcttccagccgcttcttcatggacggcacctgtgaccgcagacgggtgttttcctccgtcagctcctgtaccttgtgccgatccgtcacgctgcgcagtgccattttctttagctgctcgacctgatccaccgtcacgccctttactgcccctgtgagcgtcttttccggctgaatatcatgcaggggtgcatttaccctgtcagcctcctttaagagccgcacagtgcctttcagagcgtcccgctgccgttccagctcagcaacctcccgctctactgccgctgtctgctgctgcaccgcttccagcctcgcagccgcttccttgaactgcggcaagtccatgtgcggtctgttcgtgccgagagagataatttcaaaatcgtgccgctgggcgatctccgtcagagcttctttctcccgttccatccacgccgcccattcggtctgctttctgccgacaccgacaaacccctgctgcttcaatgcctgtttcatagatacccttgtagaaagtcctcttgactgctccgttgccacagggataaaatcgacatggagatggggcgttgcctcgtccatgtgcagcaccatattgaacacccgcagatgggggttgcgttctgcaaaagactccgcaaaatctttcagagctgccgccgcccgttctccgtccggcgtaccgcacccacagtcgctcatgttgccgatctggaagatcgcttcatggaacagcttttcctgtttactctgccggatatgctcatagtagtccggtatcttatctctcgttttggttttctttgcgttgtaggctgcgagagcttcatcaaagaccatatgatagacctgcttcagatcctcgttgcagaaaacaatgttctgctccgtccggctccggtctacattcgccgctgagaagctgcggttgttgtgccggatgctccctgcacctgtcatacccgaaatcgtaactcccataaaatcgccccctttccgcttattcttccgtcctctattttatcataaatttccgctaaaaacaacctctttgttactttctggtgagaaagtaacgcaaaagcactttcacaccgccaccccatcggtgcagcggtgtgaaagtgctttgcgcccctaaaggggaggggttgccggagctgcttcactgccggctcgtgcctgctgctctgccagctccggaggggcgctgcccctgccgtctgcggacggctccccgaccttcatcccaccgataaactgaaatttaatactcaatgacaattttcttgcacttctcgcagagccaagcctccgcagacgctccaccaaaaggtccaccgattgacttttcattgagtttgattgacttgcccccaccaatgttgagggccgcaataactcgttctttttcgctccaatagacaccatctctgcattgaatacaaccaagttgcatttcttcaccacaatacggacatttcattttaatcacccctacaaattcccgatttgtcgttctgtttagtccccaaagaacctactaaaccagctacgcttttgaaccggttctgtctcacgctccggctgatcggctccggacttgccggaaagaagctgctgatgcattgtcccagcatggagagcctgggccgctgccgcagtctgctgtgccgtcaccaacgccgagctgacctccgccaaccttgcgttcagttcctcgatctgcttgtcctttacagcaagttgctcgcttttccggtctaattctccctgcagcatagcgatcaaagtggtttcgcaagtttcgcaacttgctttcgcctgttgcgaaacttgctttcgttcaacacctaaataatgctgatatatggcggttttttgactttcgctgattgcgaaacttcctttcgcatctttcgcaacatggtttcgcctacaccatgcacgaactgcctgttccgacacgccacattctattgcaatttccgttattacacccgccaaatatcatcaccactctttcatccggagttaatctcaaaacaaatcgctatgagatcccgtccttatcaatttcaaaatcaaagtctgccgaacaactttatagaccaacagccagtccggctcgatgtgacattctctcatgtccttataatttctggaattagtgagagcatgatctcgatacgcctccggcaacggctgctcgttacacaacagcgtgatcacttcctccaacttcttcggatcgcagcctctcttgatcgcaagcttgtaatctcgtttgaactgccccgaaaactccggcttaagcattcagcgcctccatcagatctgcaacgctatcaaacggaccatacatatcctctcccttttctgccgcctccatcgccgcataggtaacagcattcggctcgtcaaccttgacttcaaagggaagtccatgacacctaagtgcctgtcgataaaaaatacccgttgccgtactcaaatccattccgagggacttaaagagagctgccgcctgtgctttcagctccggctccattcttatcgtcatatttcctttagccataatagcactcctttcctcgtcatttttagcttgcactaatattatattcaatattcgtgacatttgcaagtgcattgcaaatgtttttttgcaacttttctatgaacagtgctttctatatgctaacaccgcagcgtgtacatttagggggtgaaaaagccttatttcgcgcggttttcaagcctcgttttcggtggggtaatataaaaacccttatctttacattaccttctgaaacatatggcgcaccttgtccaggcggctgtttggacggcggggctggatgaccggctgaccgacagcggcctgatatcctttcagctctgtaaggcatacgctccgcccgttggtgtaaaaggccagatcagtacggtatgcctgtatacagcgggcgggaatctcgccagtaaagacaacttcatccttttttacctgggccgtttcgatggtggcacagtatttcggtgcatcatgataagccctggaaaggtattcctggggcgcatagaggatgaaggagagataaggttccagcagctgcgtccccgattccttcaatgcctgttccaatacaatcggggccaatgagcggaagtccgccggcgtgctgaccggactgtaataaagcccgtattcaaagcaaatcttacagtccgttacgttccagccgaacaagccctgctccagcccgtaacggataccatccctgacagcgttttgaaaactctggttcaagtatcccagcgaaacccggctctcgtattgtacaccggagccaagcgagagtggtgtaacagacagtcctatggatgcccaaaacgggttgggcggcacctcgatatggatggtgtggctggctgctttgagcggccgctccatataaatgacggagggttcctttaccactgtttcaagcttgtatttttccgacagcaaagcggaaacaacctccaactgcacccggcccaaaaaagaaagaatgatctcatgggtgatggaatccacttcgcaacgcaaaagcgggtcagtatccgcaagttgcgtaagagcgtccagcagccgttctctttgcgctgccgttttcggcgcaatcgtcgtccgcagcatggggagggggtcctcgcgccaccttttacgagggagccgggtttggtcccctaatacatcgtttaacctcacgctgtcgctgggaaggataacaatttcaccctgataagcggtgtctgtccgaacaatttcccctttggatggaatacgcatctctgtgattttcagcttttctctcccggccagggccaccgtatcccgcaggcgcagcgttccgctgtataaccgtagatagacacgccgctggccgcaatcggtgtactcaaccttgaaaacgctgccgcatagggcggcgcccccctgttccccaatcggttggaacagccctgtcaccgcatccatcaacggttgaatgccaaggccatttttggcgctgccatgatagactgggaacagggaggcgtcttgaacccgctgctgttcctcccgcgcaagtttttcccggctgattggttctcctgcgatatacttttccaataattcatcgttattttcgatgaccgcatcccatgcttctatgtcggtattttcctccaggactatttccggggacagcgacaccgtctgcttgatgataatatcggcggagagcttatcccgaacagactgaaccacgctctgcaaatcaacgccagcctggtcgatcttgttgataaagataacggtgggaatgttcattttccgcagggcatggaacagaatacgggtctgggcctgcacgccatctttagcggagatcaccaagatggccccatctaaaacagccaaagagcggtacacctccgccaaaaaatccatgtggccgggcgtatccacaatgttaactttacatctgtgccactggaaggaagtgactgccgcttgaatggtaatcccacgctgccgctccaaaaacatggtgtccgtcctcgttgtccctttttcgacgctccccggttctgaaatggctccgctggcatatagcaggctctccgtcaaggtcgtctttccagcgtctacatgggcaagaattccaatattgattattttcatgtgattgtcctccctttacagccccaaagggcataaaaatccccagcagtaaaatacttttaccactggggattataagttgcggacatacacatatacagcatacacctgtttgtgattgctgtttttggggatatgtcaaaattgataaggcaaaagtattcttaaattgggtacaaaaaactaagcccctacaaaaggagctatcataatcctttgttcccactatttgattatagttttatttaagaataccttgccgcatattttttactccttttctggattaaatcattgtatcacatcagttttaggaaagcaagtacctaaaagaaatttttcttccccttacccgccccgaaaacgccttgtagggcgtttctggggcgtttacagccctttcttaaattcctccaccaacagatcgctcaaagcctgtgatgggcgtattttgaccgttatatgcccctccggtacggtgtcccaccatttgcggatcgttttcggatcaagtccggtgtccctatgacaatcggccttgcgtccctctggatgctcctgccgccacgcatagacttgcgctttcttttcttctgccccttttcttctccatgtgccgccaggataatccacttcctgcaccgcccttgctcttttcaaatgctctttctgtgatctaccattcctcttgttgcgctcgatgcgaacatcggtcagagcttcaatatcggaaatcgtgaaattgtaatactccttgtcgtaggcttccagcgcactccgtatatcttcctcggtcaatgcgttctcatgcttcaccatctgcagatcatcaaaagcctctttcatatcctgccggagctgctgcttcgacaca

SEQ ID NO: 580 - DNA, 2998 bp, Enterocloster bolteae
  source 1..2998: mol_type = genomic DNA
cgtgctttatagaaagaaagtacttatggaaaggaacaggaaaaattcttgtttctacaggacatttcccctgttttctttccataatacatttattacttctgtccaagacttgtcagccaagacaaaaggtcatcgtttttttgccatgatgttatttcatttgttgaaattcctatgtctgctttttcaaaagctgcccgtttcatttctgcatcggctttggcataaacctctgttgtggtgatatcgatgtgacctagaaagtcacggatataatgcagatcaacatttgcccttaataagtgcatggcttttgtgtgcctcatgacatgaggtgttaccgattcatttgaaaggttcccatcggcctgtagttcattggcatacttttttaagatataagtaaccccagggcgggtaaggcgttttccctgatgattacagaataaagcctgatctgggttcctttgtggatttaatccgtgtctttccatataactttttagaattattgctgtcgggtgcaggatggggactgttctcgttttcctcccttttcccgtcaggcggatgacactgggttcatcaagtctcacatcacggactgacaaatcaatcaactcctgaacccttgcaccggtgtcatataaaacacatagcagcgcggcatccctccttccatagttggtagtctgatccggcctggataaaaggttttttagtgaatcttctgataaataattaaccacagccttttcatgctttttcatacgtattgataggattttctggcattgcaagagcatatccggtctgttaagctggagataccgaaaaaaggcatgtactgccgccagtctctgattacgggtagaaatggaattgtgtctcttgtcctccaaccacgccataaattcgttgatggtctggtctgtcagtctgctcaactgtactttttccggcgaacagttctgctcctcttctaaataggtcagaagaagacagaacgtatctcggtaagagcggattgtattgatacttaagtttctctgacctgccagataattagtgaaatagtctgccagacttcgggcaaaatcagtcggtttgttcatcggcttccaccctttccggcagcaatcctccaaaagccgcttccattttttccaaaatttcaggatatagttcagaagttagatgaagatattttgaagtccccttgtatgttttgtgccccatatatgtggataaaatcggcaggacctcggcgggcctcttcccttcttcaagaagtttctggagactgtggactgcaaatgtatgtctcaggtcatggaggcgtggcccaacatttcgccctccgtatgaaataccgctgttccagaggatatcccggaaagttttacggattgtaaaaatgtgataggaaagaccgtcaggcgcaggaaagaaatatccttccggaccaaatccggataaaacgtattctttgtaatccatacaccgctggtataagtcctggtttaacggaatcaggcggtccctatagtcctttgcatcgtggataaaaataacgccgtgttcaaaatcaatatcggaaaccttcagatttaatgcctcagaagccctgagcccgcagcaataaaggaggcggaacagcaagggaaggattaaatgacgccgaattgagaaacaggatggcgaaaggctgtcaatcgtcttgaatacacgtctgatttcgtcatggctaaaaatataggggctatgctcataggtcctctttggaatcatactattgggatacagatagacctcgcaaccattccgagacataaacatggcaagttgccgtattaagttaactttagaatgggtcgtctgtgggctatggtttgcctgacgctgtgtccaggcgagtacgagttctctgggcagcctgtcaatacagtcgtagttaagcgaaaacctgtccagatttttcagttcaaagtattcgcgctcatatttatagccgaggcggtgtttctcttccaggaacccaatgatccattgtgaaagactactaataaatttataatctttttctttgatctgcattagagtacctccattgataacgtgcagctacgcagctgctcggtatccacacggagatagttcgcagtagtctccactctttgatggccgagtatttcagaaataaccggaaggggtacttctctttttaataattcggtagccagtgaatggcgcaaggtatgcatcccatgggatttttctggtgtaaccacaatcccggctttgtaaatgtagttgttcagcatctggtagagacggttgttttcattaaaagcattgtacggaaccctgtggcaaataaaaatgttaggaaccggcgattcaggacggccattctttaaataatcaatgacggcgttgcccacatcttcaaacaggggcagcgtcagcggctgtttggttttaaactgcacaagctctatgcagtttttctcccatttaatgttttcatatttcatatggatgatatcccttaccctcaatcccaggcgggcaaccatcagtatgatggcataatctctttttccaattggattaccaatatcaacgcagtccaggattttttccaaatcttcaggactccagatggaaggaagatgctccctggagcgtaagatgttcgatttaggtataaaaagggataaatccttttcatgatgtccattgagatacagatagcggaaaaactgcctcagctcacttagtagggcggcaacagaacggccatgataactggcaacagtcgcaataaagggggtgatatattccggcttaagcaaacgaaaggattctacctgctcctgctggagaaacttagttagacgccgcagcgttctggcataatctgagatggtagacggcacatacccatttgtctttaaatgctgaagaaacagatccgcaatggtgcaaaatg

SEQ ID NO: 581 - DNA, 495 bp, Enterocloster bolteae
  source 1..495: mol_type = genomic DNA
ttatgacaagttatgtgttatggaaagtttttaagaaaaaccaagtaattataatctttgctggtctattgctttccataattctggttgaatttacaatgcgggtagtgtttactcaaatggaaggctaagcctatcataaatatcggaggtaaacacaaatgaacaaccacaatcatcaatcagactctgcattatattctcttatgcttggagctgaaaatgagctacgtaagctcaattactctgattccaccatccgccatcgttgggaagtctggaaacgctatcttaagttttctatgaaagaagacttccagcaacaggattggcatgactttttgaaacaagtctatgggattgaagaaatacagggagaacttacacgcaatcaacgcaccgcgcgggaagcttttcagacgctctatcagttttataaagatggccgcttacagcattggagcctggtccggacggatacggaaacaattcctg
